United States Patent Application Publication US 2018/0363030 A1 - sequence listing, part 4

SEQ ID NO: 2 - DNA, 4908759 bp, Enterobacter cloacae (residues 1-1,636,253 of 4,908,759)
  misc_feature: subsp. cloacae NCTC 9394
  misc_feature (81291)..(81471): n is a, c, g, or t
  misc_feature (113401)..(113844): n is a, c, g, or t
  misc_feature (118699)..(119439): n is a, c, g, or t
  misc_feature (121180)..(121612): n is a, c, g, or t
  misc_feature (150436)..(151186): n is a, c, g, or t
  misc_feature (153134)..(153775): n is a, c, g, or t
  misc_feature (157826)..(158214): n is a, c, g, or t
  misc_feature (177806)..(178122): n is a, c, g, or t
  misc_feature (201064)..(201582): n is a, c, g, or t
  misc_feature (246166)..(246530): n is a, c, g, or t
  misc_feature (254469)..(254836): n is a, c, g, or t
  misc_feature (257644)..(258176): n is a, c, g, or t
  misc_feature (294972)..(295391): n is a, c, g, or t
  misc_feature (305536)..(307543): n is a, c, g, or t
  misc_feature (315963)..(316446): n is a, c, g, or t
  misc_feature (354955)..(355321): n is a, c, g, or t
  misc_feature (382326)..(382728): n is a, c, g, or t
  misc_feature (403136)..(403401): n is a, c, g, or t
  misc_feature (425476)..(426053): n is a, c, g, or t
  misc_feature (521536)..(522085): n is a, c, g, or t
  misc_feature (525870)..(526254): n is a, c, g, or t
  misc_feature (545774)..(546220): n is a, c, g, or t
  misc_feature (568526)..(568708): n is a, c, g, or t
  misc_feature (585535)..(585913): n is a, c, g, or t
  misc_feature (600891)..(602229): n is a, c, g, or t
  misc_feature (608849)..(609190): n is a, c, g, or t
  misc_feature (614614)..(616103): n is a, c, g, or t
  misc_feature (638097)..(638365): n is a, c, g, or t
  misc_feature (650504)..(651137): n is a, c, g, or t
  misc_feature (659571)..(659859): n is a, c, g, or t
  misc_feature (663344)..(663891): n is a, c, g, or t
  misc_feature (679855)..(680656): n is a, c, g, or t
  misc_feature (690110)..(690561): n is a, c, g, or t
  misc_feature (700489)..(700815): n is a, c, g, or t
  misc_feature (709721)..(710055): n is a, c, g, or t
  misc_feature (717718)..(717892): n is a, c, g, or t
  misc_feature (727313)..(727860): n is a, c, g, or t
  misc_feature (738895)..(739366): n is a, c, g, or t
  misc_feature (759081)..(760393): n is a, c, g, or t
  misc_feature (766475)..(766913): n is a, c, g, or t
  misc_feature (775208)..(775516): n is a, c, g, or t
  misc_feature (780559)..(781176): n is a, c, g, or t
  misc_feature (783821)..(784433): n is a, c, g, or t
  misc_feature (789592)..(790187): n is a, c, g, or t
  misc_feature (794556)..(794796): n is a, c, g, or t
  misc_feature (797767)..(798456): n is a, c, g, or t
  misc_feature (801696)..(802084): n is a, c, g, or t
  misc_feature (821162)..(821505): n is a, c, g, or t
  misc_feature (825319)..(825748): n is a, c, g, or t
  misc_feature (833050)..(833551): n is a, c, g, or t
  misc_feature (839004)..(839380): n is a, c, g, or t
  misc_feature (843907)..(844308): n is a, c, g, or t
  misc_feature (849798)..(850081): n is a, c, g, or t
  misc_feature (858249)..(858587): n is a, c, g, or t
  misc_feature (865088)..(865613): n is a, c, g, or t
  misc_feature (884141)..(884564): n is a, c, g, or t
  misc_feature (887788)..(888365): n is a, c, g, or t
  misc_feature (891793)..(892296): n is a, c, g, or t
  misc_feature (895796)..(896325): n is a, c, g, or t
  misc_feature (899291)..(899745): n is a, c, g, or t
  misc_feature (906867)..(907106): n is a, c, g, or t
  misc_feature (912125)..(912645): n is a, c, g, or t
  misc_feature (925674)..(926259): n is a, c, g, or t
  misc_feature (933227)..(933745): n is a, c, g, or t
  misc_feature (948599)..(950142): n is a, c, g, or t
  misc_feature (954819)..(955179): n is a, c, g, or t
  misc_feature (963823)..(964156): n is a, c, g, or t
  misc_feature (967376)..(967936): n is a, c, g, or t
  misc_feature (981422)..(981835): n is a, c, g, or t
  misc_feature (983894)..(985363): n is a, c, g, or t
  misc_feature (992621)..(993194): n is a, c, g, or t
  misc_feature (998086)..(998433): n is a, c, g, or t
  misc_feature (1008268)..(1008525): n is a, c, g, or t
  misc_feature (1014139)..(1015169): n is a, c, g, or t
  misc_feature (1025376)..(1026501): n is a, c, g, or t
  misc_feature (1037731)..(1038162): n is a, c, g, or t
  misc_feature (1044863)..(1045651): n is a, c, g, or t
  misc_feature (1047628)..(1048267): n is a, c, g, or t
  misc_feature (1054625)..(1054963): n is a, c, g, or t
  misc_feature (1058086)..(1058568): n is a, c, g, or t
  misc_feature (1066629)..(1068386): n is a, c, g, or t
  misc_feature (1088591)..(1089084): n is a, c, g, or t
  misc_feature (1090057)..(1091689): n is a, c, g, or t
  misc_feature (1099792)..(1100351): n is a, c, g, or t
  misc_feature (1124993)..(1125609): n is a, c, g, or t
  misc_feature (1128228)..(1128472): n is a, c, g, or t
  misc_feature (1138547)..(1138848): n is a, c, g, or t
  misc_feature (1145759)..(1146188): n is a, c, g, or t
  misc_feature (1153330)..(1153625): n is a, c, g, or t
  misc_feature (1163718)..(1164544): n is a, c, g, or t
  misc_feature (1168101)..(1170371): n is a, c, g, or t
  misc_feature (1177741)..(1178164): n is a, c, g, or t
  misc_feature (1181699)..(1183277): n is a, c, g, or t
  misc_feature (1189023)..(1189979): n is a, c, g, or t
  misc_feature (1191906)..(1192547): n is a, c, g, or t
  misc_feature (1207390)..(1207615): n is a, c, g, or t
  misc_feature (1230663)..(1231057): n is a, c, g, or t
  misc_feature (1234604)..(1236098): n is a, c, g, or t
  misc_feature (1238485)..(1239096): n is a, c, g, or t
  misc_feature (1245463)..(1245885): n is a, c, g, or t
  misc_feature (1248018)..(1248283): n is a, c, g, or t
  misc_feature (1278220)..(1278818): n is a, c, g, or t
  misc_feature (1290444)..(1290778): n is a, c, g, or t
  misc_feature (1294630)..(1294927): n is a, c, g, or t
  misc_feature (1299330)..(1299799): n is a, c, g, or t
  misc_feature (1302504)..(1303186): n is a, c, g, or t
  misc_feature (1309021)..(1309238): n is a, c, g, or t
  misc_feature (1311923)..(1312953): n is a, c, g, or t
  misc_feature (1319241)..(1319589): n is a, c, g, or t
  misc_feature (1324853)..(1325307): n is a, c, g, or t
  misc_feature (1339554)..(1339796): n is a, c, g, or t
  misc_feature (1341866)..(1342377): n is a, c, g, or t
  misc_feature (1350709)..(1351175): n is a, c, g, or t
  misc_feature (1356162)..(1356656): n is a, c, g, or t
  misc_feature (1374235)..(1374568): n is a, c, g, or t
  misc_feature (1387096)..(1387506): n is a, c, g, or t
  misc_feature (1397306)..(1397635): n is a, c, g, or t
  misc_feature (1409284)..(1409757): n is a, c, g, or t
  misc_feature (1412895)..(1413509): n is a, c, g, or t
  misc_feature (1429027)..(1429676): n is a, c, g, or t
  misc_feature (1432723)..(1433175): n is a, c, g, or t
  misc_feature (1441393)..(1442169): n is a, c, g, or t
  misc_feature (1443977)..(1445781): n is a, c, g, or t
  misc_feature (1447218)..(1449049): n is a, c, g, or t
  misc_feature (1450470)..(1451008): n is a, c, g, or t
  misc_feature (1460745)..(1461036): n is a, c, g, or t
  misc_feature (1464265)..(1464519): n is a, c, g, or t
  misc_feature (1489755)..(1491033): n is a, c, g, or t
  misc_feature (1493350)..(1493785): n is a, c, g, or t
  misc_feature (1495985)..(1496816): n is a, c, g, or t
  misc_feature (1499178)..(1499454): n is a, c, g, or t
  misc_feature (1514104)..(1514549): n is a, c, g, or t
  misc_feature (1517482)..(1518356): n is a, c, g, or t
  misc_feature (1523787)..(1524244): n is a, c, g, or t
  misc_feature (1540196)..(1540540): n is a, c, g, or t
  misc_feature (1558802)..(1559078): n is a, c, g, or t
  misc_feature (1570385)..(1570999): n is a, c, g, or t
  misc_feature (1575273)..(1576027): n is a, c, g, or t
  misc_feature (1581871)..(1582173): n is a, c, g, or t
  misc_feature (1591113)..(1591613): n is a, c, g, or t
  misc_feature (1596364)..(1596917): n is a, c, g, or t
  misc_feature (1600270)..(1600599): n is a, c, g, or t
  misc_feature (1602903)..(1603711): n is a, c, g, or t
  misc_feature (1607596)..(1608046): n is a, c, g, or t
  misc_feature (1620537)..(1621025): n is a, c, g, or t
  misc_feature (1630263)..(1631244): n is a, c, g, or t
  misc_feature (1645125)..(1646495): n is a, c, g, or t
  misc_feature (1658810)..(1659245): n is a, c, g, or t
  misc_feature (1661774)..(1662323): n is a, c, g, or t
  misc_feature (1671611)..(1671932): n is a, c, g, or t
  misc_feature (1674755)..(1675241): n is a, c, g, or t
  misc_feature (1684968)..(1685172): n is a, c, g, or t
  misc_feature (1695050)..(1695483): n is a, c, g, or t
  misc_feature (1706970)..(1707413): n is a, c, g, or t
  misc_feature (1711703)..(1711998): n is a, c, g, or t
  misc_feature (1717155)..(1717561): n is a, c, g, or t
  misc_feature (1725832)..(1726271): n is a, c, g, or t
  misc_feature (1732289)..(1733157): n is a, c, g, or t
  misc_feature (1734949)..(1735175): n is a, c, g, or t
  misc_feature (1738092)..(1739249): n is a, c, g, or t
  misc_feature (1764118)..(1764551): n is a, c, g, or t
  misc_feature (1767496)..(1767936): n is a, c, g, or t
  misc_feature (1770729)..(1771057): n is a, c, g, or t
  misc_feature (1774424)..(1774774): n is a, c, g, or t
  misc_feature (1784278)..(1784653): n is a, c, g, or t
  misc_feature (1796858)..(1797148): n is a, c, g, or t
  misc_feature (1813933)..(1814339): n is a, c, g, or t
  misc_feature (1821309)..(1822004): n is a, c, g, or t
  misc_feature (1824737)..(1825053): n is a, c, g, or t
  misc_feature (1828500)..(1828802): n is a, c, g, or t
  misc_feature (1836695)..(1837034): n is a, c, g, or t
  misc_feature (1841563)..(1841769): n is a, c, g, or t
  misc_feature (1848533)..(1848860): n is a, c, g, or t
  misc_feature (1852218)..(1852548): n is a, c, g, or t
  misc_feature (1856666)..(1857235): n is a, c, g, or t
  misc_feature (1873233)..(1874018): n is a, c, g, or t
  misc_feature (1877248)..(1879275): n is a, c, g, or t
  misc_feature (1883455)..(1883948): n is a, c, g, or t
  misc_feature (1899936)..(1900333): n is a, c, g, or t
  misc_feature (1909807)..(1910354): n is a, c, g, or t
  misc_feature (1914506)..(1914882): n is a, c, g, or t
  misc_feature (1966706)..(1967053): n is a, c, g, or t
  misc_feature (1969911)..(1970413): n is a, c, g, or t
  misc_feature (1972445)..(1973201): n is a, c, g, or t
  misc_feature (1986565)..(1986937): n is a, c, g, or t
  misc_feature (1992351)..(1992929): n is a, c, g, or t
  misc_feature (1997326)..(1998035): n is a, c, g, or t
  misc_feature (2001337)..(2002270): n is a, c, g, or t
  misc_feature (2007364)..(2007764): n is a, c, g, or t
  misc_feature (2021973)..(2022265): n is a, c, g, or t
  misc_feature (2028562)..(2029141): n is a, c, g, or t
  misc_feature (2034721)..(2035038): n is a, c, g, or t
  misc_feature (2054966)..(2055192): n is a, c, g, or t
  misc_feature (2069191)..(2069539): n is a, c, g, or t
  misc_feature (2073986)..(2074272): n is a, c, g, or t
  misc_feature (2084746)..(2085107): n is a, c, g, or t
  misc_feature (2090169)..(2090517): n is a, c, g, or t
  misc_feature (2095614)..(2097167): n is a, c, g, or t
  misc_feature (2106615)..(2106974): n is a, c, g, or t
  misc_feature (2114580)..(2114944): n is a, c, g, or t
  misc_feature (2131682)..(2132022): n is a, c, g, or t
  misc_feature (2134789)..(2135327): n is a, c, g, or t
  misc_feature (2138216)..(2138756): n is a, c, g, or t
  misc_feature (2141515)..(2141979): n is a, c, g, or t
  misc_feature (2167201)..(2168494): n is a, c, g, or t
  misc_feature (2175793)..(2176033): n is a, c, g, or t
  misc_feature (2197629)..(2197945): n is a, c, g, or t
  misc_feature (2203977)..(2204394): n is a, c, g, or t
  misc_feature (2208026)..(2209167): n is a, c, g, or t
  misc_feature (2217424)..(2217780): n is a, c, g, or t
  misc_feature (2227089)..(2227560): n is a, c, g, or t
  misc_feature (2249456)..(2250666): n is a, c, g, or t
  misc_feature (2254557)..(2254839): n is a, c, g, or t
  misc_feature (2264519)..(2264976): n is a, c, g, or t
  misc_feature (2274429)..(2274729): n is a, c, g, or t
  misc_feature (2297109)..(2297573): n is a, c, g, or t
  misc_feature (2304217)..(2304694): n is a, c, g, or t
  misc_feature (2308121)..(2308738): n is a, c, g, or t
  misc_feature (2313573)..(2314013): n is a, c, g, or t
  misc_feature (2333815)..(2334108): n is a, c, g, or t
  misc_feature (2340649)..(2341084): n is a, c, g, or t
  misc_feature (2361318)..(2361709): n is a, c, g, or t
  misc_feature (2370124)..(2370552): n is a, c, g, or t
  misc_feature (2397192)..(2397626): n is a, c, g, or t
  misc_feature (2411162)..(2411484): n is a, c, g, or t
  misc_feature (2423375)..(2423767): n is a, c, g, or t
  misc_feature (2431224)..(2431594): n is a, c, g, or t
  misc_feature (2444435)..(2444963): n is a, c, g, or t
  misc_feature (2450673)..(2450950): n is a, c, g, or t
  misc_feature (2460851)..(2461227): n is a, c, g, or t
  misc_feature (2466335)..(2466804): n is a, c, g, or t
  misc_feature (2566683)..(2567604): n is a, c, g, or t
  misc_feature (2576460)..(2576879): n is a, c, g, or t
  misc_feature (2590271)..(2590754): n is a, c, g, or t
  misc_feature (2604244)..(2604726): n is a, c, g, or t
  misc_feature (2617075)..(2617609): n is a, c, g, or t
  misc_feature (2620435)..(2620650): n is a, c, g, or t
  misc_feature (2625363)..(2625935): n is a, c, g, or t
  misc_feature (2628221)..(2628577): n is a, c, g, or t
  misc_feature (2646182)..(2646528): n is a, c, g, or t
  misc_feature (2648612)..(2649110): n is a, c, g, or t
  misc_feature (2662317)..(2662623): n is a, c, g, or t
  misc_feature (2668669)..(2669195): n is a, c, g, or t
  misc_feature (2700194)..(2700425): n is a, c, g, or t
  misc_feature (2703902)..(2704733): n is a, c, g, or t
  misc_feature (2738531)..(2739042): n is a, c, g, or t
  misc_feature (2756448)..(2756732): n is a, c, g, or t
  misc_feature (2776105)..(2778043): n is a, c, g, or t
  misc_feature (2779912)..(2779912): n is a, c, g, or t
  misc_feature (2779931)..(2782016): n is a, c, g, or t
  misc_feature (2784533)..(2786197): n is a, c, g, or t
  misc_feature (2787671)..(2787972): n is a, c, g, or t
  misc_feature (2789019)..(2790466): n is a, c, g, or t
  misc_feature (2792394)..(2793783): n is a, c, g, or t
  misc_feature (2795812)..(2797375): n is a, c, g, or t
  misc_feature (2801023)..(2801964): n is a, c, g, or t
  misc_feature (2802802)..(2804450): n is a, c, g, or t
  misc_feature (2805992)..(2807542): n is a, c, g, or t
  misc_feature (2808864)..(2810592): n is a, c, g, or t
  misc_feature (2812640)..(2814071): n is a, c, g, or t
  misc_feature (2816390)..(2816789): n is a, c, g, or t
  misc_feature (2821739)..(2822419): n is a, c, g, or t
  misc_feature (2853332)..(2853707): n is a, c, g, or t
  misc_feature (2858457)..(2858855): n is a, c, g, or t
  misc_feature (2863937)..(2864172): n is a, c, g, or t
  misc_feature (2876638)..(2877011): n is a, c, g, or t
  misc_feature (2882678)..(2883816): n is a, c, g, or t
  misc_feature (2889568)..(2889886): n is a, c, g, or t
  misc_feature (2906061)..(2906302): n is a, c, g, or t
  misc_feature (2914803)..(2915384): n is a, c, g, or t
  misc_feature (2921051)..(2922462): n is a, c, g, or t
  misc_feature (2929678)..(2930018): n is a, c, g, or t
  misc_feature (2956835)..(2957335): n is a, c, g, or t
  misc_feature (2965986)..(2966507): n is a, c, g, or t
  misc_feature (2978406)..(2978885): n is a, c, g, or t
  misc_feature (2983008)..(2983386): n is a, c, g, or t
  misc_feature (2987086)..(2987770): n is a, c, g, or t
  misc_feature (2992989)..(2993392): n is a, c, g, or t
  misc_feature (3002401)..(3002925): n is a, c, g, or t
  misc_feature (3037465)..(3037740): n is a, c, g, or t
  misc_feature (3049415)..(3049785): n is a, c, g, or t
  misc_feature (3056404)..(3056749): n is a, c, g, or t
  misc_feature (3063521)..(3064048): n is a, c, g, or t
  misc_feature (3078959)..(3079552): n is a, c, g, or t
  misc_feature (3082903)..(3083179): n is a, c, g, or t
  misc_feature (3126402)..(3126808): n is a, c, g, or t
  misc_feature (3145152)..(3145572): n is a, c, g, or t
  misc_feature (3156864)..(3157429): n is a, c, g, or t
  misc_feature (3164539)..(3165004): n is a, c, g, or t
  misc_feature (3170336)..(3171088): n is a, c, g, or t
  misc_feature (3175207)..(3175439): n is a, c, g, or t
  misc_feature (3189455)..(3189866): n is a, c, g, or t
  misc_feature (3197369)..(3197771): n is a, c, g, or t
  misc_feature (3236756)..(3237212): n is a, c, g, or t
  misc_feature (3269441)..(3269655): n is a, c, g, or t
  misc_feature (3281986)..(3282506): n is a, c, g, or t
  misc_feature (3292322)..(3293864): n is a, c, g, or t
  misc_feature (3306700)..(3307078): n is a, c, g, or t
  misc_feature (3311779)..(3312110): n is a, c, g, or t
  misc_feature (3318429)..(3318753): n is a, c, g, or t
  misc_feature (3333055)..(3333269): n is a, c, g, or t
  misc_feature (3347109)..(3348037): n is a, c, g, or t
  misc_feature (3350410)..(3351230): n is a, c, g, or t
  misc_feature (3362763)..(3363120): n is a, c, g, or t
  misc_feature (3372910)..(3373744): n is a, c, g, or t
  misc_feature (3401986)..(3402444): n is a, c, g, or t
  misc_feature (3418421)..(3419227): n is a, c, g, or t
  misc_feature (3422476)..(3423753): n is a, c, g, or t
  misc_feature (3436511)..(3436947): n is a, c, g, or t
  misc_feature (3500844)..(3501083): n is a, c, g, or t
  misc_feature (3506313)..(3506518): n is a, c, g, or t
  misc_feature (3511295)..(3511705): n is a, c, g, or t
  misc_feature (3552717)..(3553206): n is a, c, g, or t
  misc_feature (3571681)..(3572563): n is a, c, g, or t
  misc_feature (3577620)..(3578004): n is a, c, g, or t
  misc_feature (3581987)..(3582349): n is a, c, g, or t
  misc_feature (3588576)..(3588916): n is a, c, g, or t
  misc_feature (3600562)..(3600821): n is a, c, g, or t
  misc_feature (3607129)..(3607444): n is a, c, g, or t
  misc_feature (3612073)..(3612805): n is a, c, g, or t
  misc_feature (3619109)..(3619845): n is a, c, g, or t
  misc_feature (3622855)..(3623785): n is a, c, g, or t
  misc_feature (3629954)..(3630346): n is a, c, g, or t
  misc_feature (3641939)..(3643331): n is a, c, g, or t
  misc_feature (3645119)..(3647479): n is a, c, g, or t
  misc_feature (3666883)..(3668415): n is a, c, g, or t
  misc_feature (3682801)..(3683216): n is a, c, g, or t
  misc_feature (3685244)..(3687056): n is a, c, g, or t
  misc_feature (3691638)..(3692028): n is a, c, g, or t
  misc_feature (3702641)..(3703140): n is a, c, g, or t
  misc_feature (3706667)..(3708621): n is a, c, g, or t
  misc_feature (3720819)..(3721135): n is a, c, g, or t
  misc_feature (3726887)..(3727329): n is a, c, g, or t
  misc_feature (3744688)..(3744954): n is a, c, g, or t
  misc_feature (3752990)..(3753385): n is a, c, g, or t
  misc_feature (3768813)..(3769274): n is a, c, g, or t
  misc_feature (3795795)..(3796062): n is a, c, g, or t
  misc_feature (3803627)..(3803911): n is a, c, g, or t
  misc_feature (3808941)..(3809274): n is a, c, g, or t
  misc_feature (3814740)..(3815277): n is a, c, g, or t
  misc_feature (3825156)..(3825399): n is a, c, g, or t
  misc_feature (3827496)..(3828825): n is a, c, g, or t
  misc_feature (3854715)..(3855918): n is a, c, g, or t
  misc_feature (3874299)..(3874682): n is a, c, g, or t
  misc_feature (3882339)..(3882746): n is a, c, g, or t
  misc_feature (3891853)..(3892170): n is a, c, g, or t
  misc_feature (3898253)..(3898683): n is a, c, g, or t
  misc_feature (3904348)..(3904781): n is a, c, g, or t
  misc_feature (3915032)..(3915332): n is a, c, g, or t
  misc_feature (3932415)..(3932769): n is a, c, g, or t
  misc_feature (3946974)..(3947616): n is a, c, g, or t
  misc_feature (3958257)..(3959674): n is a, c, g, or t
  misc_feature (3966656)..(3967098): n is a, c, g, or t
  misc_feature (3974318)..(3974683): n is a, c, g, or t
  misc_feature (3989468)..(3989915): n is a, c, g, or t
  misc_feature (3996581)..(3997034): n is a, c, g, or t
  misc_feature (4014312)..(4014882): n is a, c, g, or t
  misc_feature (4017278)..(4018830): n is a, c, g, or t
  misc_feature (4022675)..(4024197): n is a, c, g, or t
  misc_feature (4029471)..(4029804): n is a, c, g, or t
  misc_feature (4040673)..(4041132): n is a, c, g, or t
  misc_feature (4053895)..(4054228): n is a, c, g, or t
  misc_feature (4062618)..(4063314): n is a, c, g, or t
  misc_feature (4069191)..(4069663): n is a, c, g, or t
  misc_feature (4077678)..(4077882): n is a, c, g, or t
  misc_feature (4085795)..(4086603): n is a, c, g, or t
  misc_feature (4101225)..(4101828): n is a, c, g, or t
  misc_feature (4108007)..(4108408): n is a, c, g, or t
  misc_feature (4118140)..(4118318): n is a, c, g, or t
  misc_feature (4123764)..(4125001): n is a, c, g, or t
  misc_feature (4129564)..(4130775): n is a, c, g, or t
  misc_feature (4132628)..(4133298): n is a, c, g, or t
  misc_feature (4139071)..(4139982): n is a, c, g, or t
  misc_feature (4144248)..(4144637): n is a, c, g, or t
  misc_feature (4147187)..(4147528): n is a, c, g, or t
  misc_feature (4159358)..(4159741): n is a, c, g, or t
  misc_feature (4168151)..(4168591): n is a, c, g, or t
  misc_feature (4179179)..(4180821): n is a, c, g, or t
  misc_feature (4183892)..(4184400): n is a, c, g, or t
  misc_feature (4187214)..(4187822): n is a, c, g, or t
  misc_feature (4189921)..(4191037): n is a, c, g, or t
  misc_feature (4204252)..(4205079): n is a, c, g, or t
  misc_feature (4216481)..(4216917): n is a, c, g, or t
  misc_feature (4231834)..(4233185): n is a, c, g, or t
  misc_feature (4261821)..(4262200): n is a, c, g, or t
  misc_feature (4279165)..(4279862): n is a, c, g, or t
  misc_feature (4290777)..(4291037): n is a, c, g, or t
  misc_feature (4294843)..(4295910): n is a, c, g, or t
  misc_feature (4298486)..(4299460): n is a, c, g, or t
  misc_feature (4305389)..(4305942): n is a, c, g, or t
  misc_feature (4314086)..(4314624): n is a, c, g, or t
  misc_feature (4335227)..(4335580): n is a, c, g, or t
  misc_feature (4344650)..(4345162): n is a, c, g, or t
  misc_feature (4375458)..(4375811): n is a, c, g, or t
  misc_feature (4379265)..(4379760): n is a, c, g, or t
  misc_feature (4390439)..(4390961): n is a, c, g, or t
  misc_feature (4395737)..(4396002): n is a, c, g, or t
  misc_feature (4428033)..(4428289): n is a, c, g, or t
  misc_feature (4435201)..(4435779): n is a, c, g, or t
  misc_feature (4439201)..(4439573): n is a, c, g, or t
  misc_feature (4458114)..(4458609): n is a, c, g, or t
  misc_feature (4479874)..(4481741): n is a, c, g, or t
  misc_feature (4483889)..(4484409): n is a, c, g, or t
  misc_feature (4496806)..(4497089): n is a, c, g, or t
  misc_feature (4519229)..(4519585): n is a, c, g, or t
  misc_feature (4532326)..(4532623): n is a, c, g, or t
  misc_feature (4538599)..(4539007): n is a, c, g, or t
  misc_feature (4586547)..(4586947): n is a, c, g, or t
  misc_feature (4589921)..(4590672): n is a, c, g, or t
  misc_feature (4598951)..(4599322): n is a, c, g, or t
  misc_feature (4631846)..(4632175): n is a, c, g, or t
  misc_feature (4656260)..(4656619): n is a, c, g, or t
  misc_feature (4673739)..(4675018): n is a, c, g, or t
  misc_feature (4683826)..(4685023): n is a, c, g, or t
  misc_feature (4714181)..(4714460): n is a, c, g, or t
  misc_feature (4747903)..(4748347): n is a, c, g, or t
  misc_feature (4758905)..(4759468): n is a, c, g, or t
  misc_feature (4764378)..(4764953): n is a, c, g, or t
  misc_feature (4767494)..(4769486): n is a, c, g, or t
  misc_feature (4775598)..(4776046): n is a, c, g, or t
  misc_feature (4787731)..(4788004): n is a, c, g, or t
  misc_feature (4793869)..(4794440): n is a, c, g, or t
  misc_feature (4796656)..(4797090): n is a, c, g, or t
  misc_feature (4868442)..(4868766): n is a, c, g, or t
  misc_feature (4872217)..(4873407): n is a, c, g, or t
  misc_feature (4875477)..(4875935): n is a, c, g, or t
  misc_feature (4881433)..(4881992): n is a, c, g, or t
gtacgtcgaaaaacggcaggccgggcaaggcgaagccgccacccggcagatctcagactgcacaccacgccaaaataaacgctgcaatcccctccacattattcaaatccagaaccggtacttccagcgacaatgcaacgtcactggccacggcaatcacatgctcatccagcattagttcgctaacatcatgcccggcgccgtttctgaacagcaagatcttaggcacggcctcatgcttaaatccctcaaccagcaccagatccagcgtggagtgatccatccggctgacaagataagcgagatccagcggtgcttcatccggtgtttctgtcattaacgcccagcgctggttactcgccaccatcgtttgtgcagcgccagccttacgcagctcgtagctatctttccccggcttatcgacatccatgttatggtgcgtatgcttaatcaatccgggacgaatgcctttggcgcaaagtgcaggtattagtttttttagcagcgtagtcttcccggtgccactccaggcagagatcgctaatacgggtatcatttcttctcctgcattatctgcaaatcttccgtcgtgtttacattcacaaacgccgatttcatgtcgctgaaatcaacggaatgccctccggactgacgcataaataccataacgcgtcgctctcctgcggccaggtaatcttccagcgcggatattaacgagcgattaatcaatgcgatcgttggatggtcgcgttcaccgtcgtgtacccagacgacgggagcaccaccgcgccgctgcaccagacgttcaaccaggcaggacgggatgaagggcgtatcacatgaacaaaagagaaaccactctccatgcgactgctgcataacggaaagcattcccgccagcggaccggggtagtccaccaggttatcctgataaaccggatacccgctgcgctgataaatatcaacatgtcggttagcgctgatcgctatcgacgacacctgatctgcaagcgtatcagcaacatgctgccataatggtgcgttgttcaggagctgaagccccttatcctttccgcccattcgcgttgctctgcccccggccagaacaaccccgatgatttcctggcattgattcacgaatatcgcctcttttattgtgggattgaccctgctaacgtgtctttctaaatgaaaggagcactaccatgaaatgtaaacgtcttaatgaagtcattgagcttctccagccggcctggcaaaaagagccagagctgaatctgatgcaatttttacagaaactggcgaaagagtcaggttttgatggtgaactggcagacctttctgacgacatcctgatctaccacctgaaaatgcgtgactcggctaaagatgctgttattcctggcattcagaaagattatgaagaggattttaaaaccgcattactgcgtgcccgaggcgtaattaaagagtaaaagcttgtaagcggagccaccgaaatcgccacaagatgatatcctgaatcattcgtataatttccggatgatcggatgaacgaccaggcttttactttccagacactacacccggataccattatggatgcgctgttcgaacagggtattcgggtggattccgggttaacccctttaaacagctacgaaaaccgtgtctaccaatttcaggacgaagagcgccagcgctttgtcgtaaagttttaccgtccacagcgctggtccgcagaacaaattcaggaagagcatcagtttgcccacgatctgctggatgacgatgttcccgttgcggcacccattaaattcaataaccaaacgctgctgacccatcagggcttttactacgcgatatttccgagcctgggcggaagacagtttgaggcggataatattgatcagatggaatgggttgcccgctatctggggcgcattcatcagacgggacgtaaaaaaccgtttgttgcccgtccgacgattggtgttcaggaatatcttattgagccgcgacaggtattcgaaacatcggcgctgatcccgaatgcgctaaaggataatttcctcacggcgaccgataagcttattgatgctgtaaaagcctgctggcgggatgatattactactctgcgcctgcacggtgactgccacgccgggaatattctctggcgcgatggcccactatttgtcgatcttgatgacgcacgtatgggacccgcggtgcaggatctgtggatgctgctcaacggtgataaagccgagcagcgcatgcagcttgagaccataattgaagcttatgaagaatttagcccctttaattcagacgaaattgccttgatagaacctttacgtgcgatgcgatttgtttattatctcgcgtggttaatcaggcgttgggaagacccggcttttccccgaaatttcccctggcttaccggggaggattactggcgcaaccagatatccacatttaccgcgcaggttaaggttctacaggaaccccctttgcaattaacgccgatgtattaattggacacacccaggagagagttgatcatgaaaaaaatttggctggcgctggctggtatgattctggcatttagcgcaactgctgcgcagtttaccgacggcaagcagtacattacgctggacaagcctgttgctggcgagcctcaggtgttggagttcttctccttctactgcccgcactgctacgagtttgagcaggtacttcatgtttctgacaacgtgaagaaaaagctgccggaaggcaccaaaatgacgaaataccacgttgagttccttggcccactgggtaaagatctgactcaggcatgggcggtcgcgattgcgctgggtgtggaagataagatcaccgcgcctctgtttgaagccgtacagaaaacccagacagtacaaactacggcagatatccgtaaagtgttcgtggatgccggtgttaaaggtgaagactacgacgctgcctggaacagtttcgtggtgaaatctctcgtggcacagcaggaaaaagctgccgctgacttccagttgcagggcgtgccggcgatgtatgttaacggcaaataccaggtgaatatgcgtggtatggacacgaccagcatggatatcttcgtacaacagtacgctgataccgtgaaatacctggttgagaaaaaataacaaacataaagaaaaacgccggtcactggccggcgtttttgtatgaagatttaatcttagctatctgctcgtctttctctttccagagtgtattaagccaaagctggaaacgacgtttgaagtttttatcgttgacataatccccgtgcagttcagtgctgacgggcatcagatcaacgcggacaacgatacgcgtcagcctgccgctgagcatatcgtagaacggtgtcctgtcattttccggatagcagagcgttacgttcaacaatttatcgaactgctcacccagcacgttgagcgccattgcgatgcccgcagcctttggcggcaacaggttttgataaggagagcgagtctgctggcgcttctcttcggtaaagcgtgatccttcgacgaagttaacaatggtggtgggatgcgcgcgaaacttctcgcaagaacggcgcgtggtttccacgtccttaccgcggcgttccggatgacgaatcaaatagctgcgtgaatagcgtttcataaacggcatatccagcgcccagcaggccagaccaatgaaaggcacccaggccaactgctgtttcagaaagtatttgttcatcggaatgtgtttgcgaaacagtacgcacaatacaacgatgtcggcccagctgtggtgattgcagatcagcagataccagttctttttgttcagcttctccagcccctgaacatcccacttcagccaggggttcagatgcagcaggatcgccagcccttcacaccagcagtacatcataaaattacaaaaagcagacaccgcgcgccataccggagggacaggcagcaggagcttaattattccggcaacgatgattggcacagaacaggcgatggtaaccagaatagttaaaatgacgcttaaccataatgttatcgctgcgagtattctcgacataatgaatttattcagatagttagctgtaattgagcagccggctatccggtgctgggcgccgatcttatcagaaattcgctcagaccagggcggtttcacaccaggaggctgcggcttttcctgccaggcagcgaatttttgcatatagacagagtgcttaagtcttatatccacatagactaaataaacatcagtgaagcgcgatcttaagtgatcttatagcaatgctttgattttattatataaataagttttcagtatcacttttataaagctgttattcacctgtattaaaaatatgcacaaacttatccacagttttgttttgcgagcgatcttcccgatcgcaaaatctttttctgtataaagcgctaaaacctgatgttttcatccttctgtggcatcctttacccataaattcataaaaggcacggacattatggttcagatcccagaaaacccacttatactcgtcgatggctcttcttacctgtatcgggcgtatcatgcgtttcctcctctgaccaacagcgcaggggaacctaccggcgcaatgtacggcgtgctgaatatgcttcgcagcctgattctgcaataccacccaacccatgcggccgtggtgtttgatgcgaagggtaaaaccttccgcgatgaattatttgagcattacaaatctcaccgtccccctatgcctgacgatctgcgtgcgcaaattgaaccgttgcacgctatggtgaaagcgatggggctgccactgctggcggtgtcaggcgttgaagctgatgacgtaattggtaccctggcgcgcgaagcggaaaaagcaggccgcccggttctgatcagtaccggtgataaagacatggcgcagctggtaacgcccgggatcacgctgatcaacaccatgacaaacaccattcttggcccggaagaagtggtcgccaaatatggcgtgccgccagagctcattattgatttcctcgccctgatgggcgattcctcggataacattcctggcgtaccgggcgtaggcgaaaaaacagctcaggcgctgctgcaagggctgggcgggctggatacgctgtatgcagaacccgacaaaattgccggtcttaccttccgtggcgcaaaaaccatggccggaaagctcgccgataacaaagaggtggcttatctctcctatcagttggccaccatcaaaactgacgtagagctggagcttacctgcgagcagctggaagtgcaggaacccgccgccgacgaactgcttggcctgttcagaaaatacgaatttaaacgctggaccgcggatgttgaagccgggaaatggcttcaggcgaaaggggctaaacctgcggcgaagccgaaagagaccatcgttgtcaatgccgaagagcaggcagaagaagaggcggtagcgctctccttcgacaactatgaaaccatccttgaagagtcacggctcatcgcctggattgaaaagctgaaaaaagcgccagtatttgctttcgataccgaaacggacagcctcgataacattacggccaatatggtggggctgtcattcgcaacggagccgggtattgcagcctatgttccggtggctcacgactatctggatgcgccggagcaaatctcccgcgagcgcgccttagaactgctgaagccgattctggaagacgagaaagcgctgaaggtcgggcaaaacctgaagtacgaccgcggtattctgcaaaactacggcattgagctgcgtggtatcgcttttgacaccatgctggaatcttacattctggacagcgtggcgggccgccatgatatggattccttatccgatcgttggctgaaacacaaaaccatcacctttgaagaaattgccggtaagggcaaaaatcagctgacctttaaccagatcgcgctggaagaagcaggccgctacgccgcggaagacgctgacgtcacgctacagctgcatctcaaaatgtggccgaaattgcagaagcacgaagggccgctgaatgtgttccagaacattgagatgccgctggtgcctgtgctgtcccgcattgagcgcaatggcgttaaaatcgacccaacggtgctgcataaccactctggagagctggcgcagcgcctgaccgagcttgaacagaaggcgcatgagcttgctggcgaggcatttaacctgtcgtcaccgaaacagctgcaaaccatcctgtttgaaaaacagggtatcaagccgctaaagaaaaccccgggcggcgccccttcaacctctgaagaggtgctggaagagctggcgctggactatccgctgccaaaagttattctgcaataccgtggtctggctaagctgaaatcgacctataccgacaaactgccgttgatgatcaacccgaaaacgggccgcgtgcacacctcctatcaccaggctgtggcggcgaccgggcgactttcgtcaaccgatcctaaccttcagaacattccggtgcgtaatgaagagggccgccgtattcgccaggctttcattgcgccagaggattatctgattgtctccgcggactactcgcaaatcgaactgcgtattatggcgcacctgtcacgcgacaaaggcctgctgacggcctttgccgaagggaaggacatccaccgggcaaccgctgccgaagtgtttgggctgccgctggagagcgtgacaaacgagcagcgtcgtagtgcaaaagcgatcaacttcggtctgatttacggcatgagtgcctttggtctttcacgccagctcaatatcccgcgtaaagagtcgcagaagtatatggatctctacttcgagcggtatccgggcgtgctggaatatatggaacgtacccgcgcacaggcgaaagagaaaggctacgttgaaacgctggatggccgtcgtctctaccttccggacatcaaatccagcaacgccgcgcgccgggctggtgctgaacgtgctgcgatcaacgcccctatgcagggcactgcggcggacatcattaaacgcgcaatgattgccgtcgatgcctggctcgaaaaagagaaaccgcgcgtgaaaatgatcatgcaggtacacgatgaactggtctttgaagttcataaagacgatctggagacggtctctcagaagatccatgaactgatggaaaacagcatgaagctggacgttccgttgctggtggaagtgggtagcggcgaaaactgggatcaggctcactaagggttatcggaataacgcgcgttttatgtaagtaagcaacataagtacgcgcgttttgtgacgatcattagaattccctatgtaaagaatgaaaaaaaactacaaaaagtgctttgtccagcgaataaaaaagagtagagttaacgacgtagggtacagaggtaagatgttctatctttcagaccttttacttcacgtaatcggatttggctgaatattttagccgccccagtcagtaatgactggggcgttttttattgcggcaaagaaagtttcaggcgaaaaaaagcgcggtcatcgccgcgcctgttgttactctgcttccgcttcagtcgccggttccagatcgttaaaccagctgtcgagcttctgtcgcagtttatccacgccctgctttttcagcgaggagaacggttcaacctgtacatcgccgttgaatgccagcaccgcttcacgaaccttgttcacctgcgccttgcgcgcgccgctcgccagcttatctgcttttgtcagcagcaccagcaccgcaatatcgcttgccaccgcccagtcaatcatctgctggtcgagatcttttagcggatgacgaatatccatcagcaccaccagacctttcagacacatgcgtttttccaggtattcacccagcgcacgctgccatttgatcttcatctcttccggtacctgcgcgtaaccgtagcccggtaaatcgaccaggcgtttgccttcagccacttcaaacaggttaatcagctgagtacggccaggtgtttttgaggtacgcgccaggtttttctgattggtgagcgtattcagggcactggattttcccgcattggagcggccagcaaatgccacttcaatccctgtgtctgagggcaggtggcgaatatcgggcgcactggtgacaaaatgcgtctgttggtagttccaggtagtcacgtggtcgtctccaaaaatcgtaatctgcggggattatacctgaatgcgggcaaaaggcttttcccttcgtcattgacatgtaagtgaaagccctacggaatgtaagagatctgcccttaagcgtatgagaaatttaagagaaatcgcaggcgctaaaaaactcaaaatattaaaattcaaagagttattaatgagtaattatctgaaaatccggttttgtaccttttcatagcttgttagtttaagggaacaaggtaaagtgtgtgccagggcgaggatgccaacaggataacgacttaaggataagggtcaggagcgccaggaggcgaagactcaggattgtcaggatgaccggcgcctggaggcgtttttaacaggaaacggaaccgtatcacggacggtagtagccaagggataaacagggtttgttgcaggcaaacagggaatgtctgacccgttaagggttgtgagtcaggaaaaaaggcgacagattgctctgtcgccttttttctttgcttgctttctgctagatttcgccgcaattctatactgaagaaaacgacttaaagataaaacatcatgaaaaaaccgacctccgctgcgggcgtgaaacgccctgcaaaagcacgccgcaaaacgcgcgaagaactgaatcaggaagcgcgcgatcgcaaacgcgataaaaaacatcgtggccatgctgcgggtagccgtgctaacggtggcggtgccgcaggcgcttctgcaaaaggcaaacagcagaaagatcctcgtatcggcagtaaaactcccattccactgggcgtgacagacacgccggtcactaagcagcacaaaccaaagagcgagaaacctatgctttcaccgcaggctgagctggatatgctggagaacgatgagcgcctggatgcgctgctggaacgtcttgaagagggtgaaaccctgaccgctgaagagcagtcctgggtggacgccaaactggaccgcattgatgaactgatgcagaagctgggtctgtcctacgatgatgaagaagacgaagaggaagacgaaaagcaggaagatatgatgcgtctgctgaaaggtggaaactaacatttgcacccggcaggtacactcgtcctgcttataacccttccggttatatgttatctggtgtggttattcgttaaactacggcggttgtcgcggcgacagaagtggctgcgcacccgaatgatgtcccgcaacgggaccagaacgggccgccgtatacgaacgcgacaccaacggaaggagtgagcatgtctgtaccatctatcgactgggatttggccctgatccagaaatataactattccgggccgcgttatacctcataccccaccgcgctggagttttctgacgctttcggcgaggcggattttcagcaagctgtggcgcgctatcccgagcgcccgctgtcgctctacgtccatattccgttctgccataagctctgctacttctgcggctgcaataaaatcgttacccgccagcagcacaaagccgatcaatacctcgatgcgctcgaacaggaaattctgcaccgcgcaccgctgtttaaagggcgtcacgtcagccagcttcactggggcggtggtacgccaacttatctgaataaagcgcagatcagccgcctgatggcgctgctgcgcggcaattttagttttaacgacgacgccgaaatttcgatcgaggtcgatccgcgtgaaatcgagctggatgtgctggatcatttacgcgccgaaggtttcaaccgcctgagtatgggcgtacaggacttcaacaaagaagtacagcgcctggtaaaccgcgagcaggacgaagcgtttatctttgccttactcaaccatgcgcgtgaaatcggctttacctcaacgaatatagacctgatttacggcctgccgaagcagacgccggagagcttcgcctacacgcttaaacgcgtggctgagcttaacccggaccgtctgagcgtctttaactatgcgcacctgccgacgctgttcgccgctcagcgcaaaatcaaagatgcggatctgccttccgcccagcagaagctggacattttgcaggagaccatcgcctcgctgaccgaaaccggctatcagtttatcggaatggatcactttgcccgccctgacgatgaactggcgattgcccagcgcgaaggtgttctccaccgtaacttccagggctacaccacccagggcgataccgatctgctcggaatgggcgtctccgccatcagcatgattggcgactgctacgcccagaaccagaaagagctgaagctgtactatcagcagatagacgaaaccggcaacgcgctgtggcgcggcatcgcgctaacccgcgacgactgcatccgtcgtgatgtgattaaggcgcttatctgcaacttccgtctcgaatttcgcgaggtggagtcgcaatgggatctgcaattcagcgattactttgccgaagacctgaagcttctggcgccgctggcgaaagacgggctggtggatgtgtcggagagtgcggttgtcgtcacgccgaaaggacgtctgttgattcgtaatatctgcatgtgcttcgatgcctatctgcgtcagaaggcgcgtttacagcagttctcgcgggtgatttgagctgtaatgccgggtggcggctttgccttacccggcctacttaagtgcgagatgtaggccgggtaagcgaagcgccacccggcttttcatcgacagctcgttagctaaacagcccaaccagtgccgcacacaataccgccgcaacggcagtttgtggcgtgtggctttctgctgctccgctcgaaagcaaagtcactaatgattccagcatgatgctcccccctgtttccgggcacgatcatacaaaactcatcggaacagtaaagcgcaaaataacggcactttgcgctcaattagtaacctttacacagcggggtaagatcactccattcccagctctttcagcttgcgcgtcagggtgtttcgaccccatcccaacaggcgagccgcttcctgtttgtggccctgggtatgacgaagcgcggtagtcaacagcgtgcgctccatctcaggctgcgcttcggagagcagattttgatgaccggaacgcagcgcgcgatctgcccactgcgccagcagcgtcgcccagctgtccggcagcgcatgtccggcggtgctttcgggcacggtggcttcaaacagctcggcggggagatcctgaatcaacacttcctgtccggcggccatcacggtcagccagcgacaggtgttttccagctgacgcacgttgcccggccacgccagacgggtgagggcggcatccgtttccggatgaagctgcttggcttccacgcccagctcgcgggccgccacttgcaggaaatggcgcgccagacgcgggatatcttcccgacgctcgcgcagcggcggcaggtggacgcggatcacgttcagacgatggaataaatcctcacggaatttcccctcctgcacgcgcagctccaggttctggtgcgtcgcggcaataatacgcacgtccaccttcaccggcgcatacccgcccacgcggtaaaactggccatctgccagcacgcgcagcagtcgggtctgaacatccagcggcatatcgccgatttcatccaggaatagcgttccgccgtcagcctgttcaaagcgtccctgacgaatggtatttgccccggtaaacgcccctttttcgtggccgaacagctcagattcaatcaaatctttggggatcgccgccatgttcagggcgatgaaaggcgctttcgcccgcgggctgtggcgatgcagggcgtgcgcaaccagctctttaccggtccctgattcaccgttaatcaagacgctgatagacgagcgcgacagacgcccgatgatgcgaaacacgtcctgcatggctggcgcttcaccgatgatgtccgtcgtaggcccgaaatccggcgcgtggcggggctgctgttgctcctgatagtggctgatggcgcgttcgaccagggcaacggcttcgtcgatatcaaacggttttggcaggtaatcaaacgccccctgctggtaggcgctaacggcggcatccaggtcggagtgggcggtcattatgatgaccggaagcatggggtggcgctgtttgatctgctttaagagcgccagtccgtccatgcccggcatgcgaatatccgagagcagaacgtccggcgttttggtggtgagtgcgtcgagcacttcgctgccgctctcaaacgtcgtgcagcttaatcccgctcctgtgagcgcgcgttcaagcacccaacggatggagctatcgtcatcgactacccagactatccctcgttgcataaacgtcacctttattttttaatcggcaggaaaaccgaaaactcggtatgtcccggccaactggtaaattcaattttgccggagtgttggtcaatcaaattacgggctatggataaccccagcccggtgccgccttcgcgaccgctgaccatcgggtagaacagggtgtcctggagatgcggcgggatccccggcccgttatcttccacatcaatacgtgccgccagacgataacgtacgccgtgcagcgtcagctggaacgcggtgcgggtacgcagaataatttcgccaccctccgggcccagcgcctgcaacgcgttacgcacaatgttcaacagcacctgttcaatctggtccggatcgtgcgccagctccggcaggcttgggtcgtaatcacgcaccagcgtgacgttatccggcagctccatagagacgagtttcaccacccgctccgcgaccttgtgaatgctttctgaaatatgcatccctggctgctgcggcccgagcaggcgatcgaccagattacgcagacggtccgcctgctcgataatgacgttggtatactccgccagggcagggtcaggcagcgctttggtcaaaagctgtgccgcaccgcgtaagccgcccagcgggtttttaatttcatgagccagcccgcgtaccaggtcgcgcgccgcaatctgctgagcatgctgtagctgctcctggctgagacgacgctggttatccatcggcgccatttccagcagaatcatgccatctggcaggcgctgtgcggtgagggacaaaatatgcgagcgtccgtcaatcaccagcgtcacttcgttatcggtgaagccctgacccgcctgcaaactctcctgcatcagaccaatattcagcgagaaatagctcagcagttcaggcagcggcgtgccaaacagtttacgggcgctttgagcgagcagctgctgcgccgccgggttggcgtaatgcaccgccagctcgtcgtcgaccagcaaaatactgttaatcaaagaattgaggatctgcccagcatcgggcagcgtgccagttgccattcagcagtctcctggagtcgttgcactattttagtgcagtatagcgttttagaggtaaaaagcgcgtgagatcaggttgttggtggagaaaaaagcccatccgaagatgggctaaagtttccacggcaactactcccgacgcgtatgcgccgggtaaaacaaatcaattaaacgctgtagtacagttcgaactcaaccgggtgcggcgtcatgcgaacgcggtcgttttcttcggtacgcagcgcgatgtaagcgtcgatagcttcatcggtgaacaccccgccagcggtcaggaactcacggtctgcgtccagcgcttgcagggcttcttccagagagccagcaacctgtgggatctctttcgcttcttctggcggcaggtcgtacaggtttttgtccatggcttcgcccgggtggatcttgttcttgataccgtccagaccggccatcagcagtgctgcgaagcacaggtatgggttagccgccgggtccgggaagcgcacttcgatacgacgcgctttcggagacgccaccaccgggatacggatagacgcagaacggttacgggcagagtaagccagcatcaccggtgcttcgtaacctgggaccagacgcttgtaggagttggtggtcgggttcgccagggcgttgatcgctttagcgtgcttgataacaccgccgatgtagtgcagcgcctgctcagacagacccgcatatttgtcgccagagaacaggttggtgccgttcttggacagggacatgtggcagtgcataccggaaccgttgtcgccgaacatgggttttggcatgaaggtcgcggttttaccgaaacggtgcgcaacgttgtgcacaacgtatttgtagatctgaatctcatccgcttttttggtcatggtgttgaagcgggttgcgatttcattctggccagccgttgccacttcgtggtggtgcgcttcaacaaccaggcccatctcttccatgatcagacacatggtagaacggatgtcctgtgaagaatcgaccggaggaaccgggaagtaaccgcctttcacgcccggacggtgacctttgttaccaccttcgtatttggtggaagagttccatgcgccttcgatgtcatcgatagcgacgtgggaaccagaaatggaagcaccaaaacggatgtcatcgaacaggaagaactctggctctggcccgaacagaacggtgtctgcgataccggtagaacgcaggtactcttcagcgcgttttgcgatggagcgtgggtcacggtcatagccttgcagcgtgccaggttccaggatatcgcagcggatgatcagcgtaggttcttcgtagaacgggtcaatgagcgcagtggttgcatctggcatcagaaccatgtcggattcgttaatgcctttccagccgccaatggaggagccgtcaaacattttgccttcttcaaagaattcggcgttcacctgatgagcagggatcgtgacgtgctgttctttacctttggtatcggtgaagcgcagatcaacaaacttcacttcatgttcgttcagcatcgtcaaaacgtgttcagcggacatacttaactctccagattggtcattgtcgtcgtggtaacgaggtcttcaaatcggctgggctgccatatttttactgtatttctgtaaagcgaaatctgtgccaacttttaaaacaccccaaaaaggcgttatcatgcgcaccatagtgcagaagggctgcaccacattggatttgttgcaccattatagtgcttctgtgtgaacatcgagcaccatattggtgcaatttacgttaaagtgcccttttaccgctccgtgaaagcgatcacaaagcatctctgcaatacttgtttgcgggggatgtttgtgatcctgttttgtagtgcgattaatccgtgtacaataacgcgctatttctaaatgcctgaggcaaagttgtgatcgaaaaattgcgtaatatcgccatcatcgcgcacgtcgaccatggtaaaactaccctggttgataagctgctacagcagtccggtacgtttgatgctcgtgccgaaactcaagagcgtgtgatggactccaacgatttggagaaagagcgtgggattaccatcctcgccaaaaacaccgctatcaaatggaatgactaccgtatcaacatcgttgataccccagggcacgccgacttcggtggtgaagttgagcgcgtgatgtccatggtggattccgtgctgctggtggttgacgcatttgatggccctatgccgcaaacgcgcttcgtgaccaaaaaagcatttgcccacggcctgaaacctatcgttgtgatcaacaaggttgaccgtcctggcgcgcgtcctgactgggttgttgaccaggtcttcgacctgttcgttaacctcgacgcgaccgacgaacagctggacttccctatcgtttatgcgtctgcgctgaacggtatcgccggtctggatcacgaagacatggcggaagacatgactccgctgtaccagacgattgttgaccgcgttcctgcgccaaacgttgacctggaaggcaccctgcaaatgcagatctcccagctcgactacaacaactacgttggcgtaatcggtattggtcgtatcaagcgcggtaaagtgaagcctaaccagcaggtcactatcatcgatagcgaaggcaaaacccgtaacggtaaagtcggtaaagttctgactcacctgggccttgagcgtatcgagagcgacatcgctgaagcgggcgacatcattgccatcaccggtctgggtgaactgaacatctccgacaccatctgcgatccgcagaacgtcgaagcgctgccagccctgtccgttgatgaaccaaccgtatccatgttcttcaacgtcaacacctctccgttctgtggtaaagaaggtaagtttgttacctctcgtcagatccttgaccgcctgaacaaagagctggtgcacaacgttgcgctgcgcgttgaagaaaccgaagacgctgatgcattccgcgtttcgggtcgtggtgagctgcacctgtctgttctgattgagaacatgcgtcgtgaaggtttcgagatggcggtttcccgtccgaaagttatcttccgcgaaatcgatggccgtaaacaagagccattcgaaaacgtaacgctggacgttgaagagcagcaccagggttctgtgatgcaggcactgggtgagcgtaaaggcgacctgaaaaacatgaatccagatggcaaaggccgcgtacgtctcgactacgtgatcccaagccgtggcctgatcggcttccgttctgagttcatgaccatgacttccggtactggtctgctgtactccaccttcagccactacgacgacgttcgtccgggcgaagtgggccagcgtaacaacggcgtgctgatctccaacggtcagggtaaagcggttgcgtttgcgctgttcggtttgcaggatcgcggtaagctgttcctgggccacggtgctgaagtttacgaaggccagatcattggtattcacagccgatctaacgacctgacggtaaactgcctgaccggtaagaaactgaccaacatgcgtgcgtccggtactgacgaagcaacggttctggttccaccgatcaagatgacgctggagcaggctctggaattcatcgatgatgacgaactggtcgaagtgacgcctcagtcaattcgtatccgtaaacgtcacctgaccgagaacgatcgtaaacgtgcaatgcgcggtgcgaaagaagagtaattcggttatgccgtaggccgggtaagcgcatgcgccacccggcaacgaaaaagccgctgagcgatcagcggctttttttattagaacgaataccgcaaccctaaacggatccggtactgctcgcggttgtaatcattccatcggtccagccactgtagctcaagatacggcagccagtttctgtcgatcttatagctgaatttattggtaatttcccagtgatgatctttgccatttttgctgtggtaatcattcacccgctggaaaaagtgcggctcaaaggtgtagaaaaacgcatccgtcactttgaaattccagtagttggcaaattcatgtgtgtcgttcttatccatctgcccgttatagtccggcgtatcgtaattgttatggttatagcgatagcggaacgtcagattaaaccagtccgtaaatttatagttagtatctaaataaaccgcgccacctgatcctgcgctgctgtcattaatcaagccgccgggctggaaggtcagtttgtcggtcggtttgaagagtggataccacccctcaatttcgttatagctgtgcttcagttcgtcccatttccccacgttataagcgttggtgaacatcagtcccgcgcccatatcgaagttatagcccgcacgcaggatcacttcgtgcagctcagaggcggtgttgtaggcttcgcgcgtttcgacataggccccggcaaaaaccgggcaggacacagacgacacgatcagtacggtgatgattcttttcataatttgtccatgtatcaggtacagaaaggcctccctcctgataaacaggaaggacatactggccggatttattgttataaagtgactgctgacgctttattgttggtggttatctcaggggtattcgcggtctgttttttccgttttccaatctcctcgataataaaggcgaagcgcgcttcgttgagtttataaaacagccccatggtcacggcggcaacgatcgccaggccgcacggccagaggaaaataagctgacgcaacccaagcagcgtgcccgcgctctgcacggcatggggaacgtagccaatctgggtcagcataataccgggcagaaaaccggccagcgccgcggagattttgcgcgagaaggtatagccggtatacaccgacccttcggcgcgtatcccggttttccactcgccgtaatcaaccgtatccggcaccagcgcccagttcaggctgttcacaaacgcggtgccgaaaaaggccatgcaggaaaagagcacgaacagcagggaactggtcccccagacgaagttcagcacgtcgcccaccgcccacagcgtcagcccgcccagatagaccggtttcttgccaaagcgcttcaccgcgccaggcaccagaaacacgccaatcagaatgcagcccatgctgaaaaagcccatccacgacaggagatgcacatcgttcagcacgtactgggtgtaatagacctgaatcgccagcttgatgttaaacgcggcgagggtacataggttggcgatgcacagcaccagcagcggcgggttacggaaaatcgcgcagaacgatttcagaatgccgggcttatggtgatcgggcgtaagctcgacgtagcgctctttcaccccgctgtagcaccaccacatgcagaacagccccccggtgacaaacaccagcgcggccaccagatagccgagtgagggctggctgacgaacagcgcctggatcggcataaagccgacggtgcagagcaacagccctaccgttgcgccgccctgacgccacgccgcaagctgcgcgcgctcgttcgggtttttggtgatggccggaaccattgcaccgtaggcacagttcatcaggctgtagcagaggccaaacatcatgaagagcacggtggcgagggccgttttcaccgtcaggctaaagtcgttggccataaactgcgccgtggccaccagcgccacaggaacggaggcgtagagaatgaatggccggaatttcccccgcgcgccgatgttacgccgggagtccagcagcaccccggtcagcatgtcggtaaacgcggtgaaaaacttcgcgacgaggaaaataatgccgccatagaacgccggcatgcccagttcatcggtgtaaaacttcagcagatacagcgtgccaatacacagcatcaggttcgagccaaaatcacccatcccgtaggcgcacttctctcgcaggctcaatttcagggttaacggatcagtattatgtgtcatggtcgatcctcaaagcgccccgcgaggcgctcaatcacgtcatttatgccgtacgtttgcgcagctcaatttcttccacgatgcgcacatacatcttctcgttaaggttgtagaagcagcccatcgccacgatggtgatgactgccagcagactcggatagataaatatcagctgccgtagcccttcaaccgtgccggcggattgcacctcgttaggcacatagccgatctgcgtgagcatgatccccgggaagaagcccgccagcgcctgcgataccttacggaagaaggtaaagccggtgtagaccgtcccctcggagcgtacgccggtgcgccactcgccgtattccacggtatcggacaccagcgcccagttcaggctgttcacgaacgcggagccgaagaacgccaggcaggagaacgccacgaagctcaccgagccgccgccgaagaagtagttaagcagatcgcccgccacccaaatcatcagcccgctgatgtagacctttttcttaccgaagcgccgcaccgcgccgggcatcataaagacgccgataaaaatacagcccatgctgaagaagcccatgtacgacagcaggatcgggtcgttcagtacgtactgcgtgtagtagacctgaatggcgagcttaacgttaaaggcgcccagcgtgcacaggttagcgatgcacaggataaacagcggacggttcccggcgatggcgcgaaacgactgcaacagccccggtttctgcgccgggttagcaggctgcgtctcgacgtaacgctcggttacgcccttatagcaccaccacataaagaacaacccgaacagcgagaagagggtggcggcaaagatgtagccaagctggtcgttgccctcaatcaggttcatcaccgggacaaagcccaccgtacagagcagcagacccagcgtggcgccgccctggcgccaggcggccagcgaagcacgctcgtccgggtttttggtaatggcgggcaccatcgcgccgtaggagcagttcatcatgctgaagaacaggccgtacagcatgaacagcaccgtcgccatcaccgttttaccggtaatttcaaacggtgtgccgacgaagttagctatggccagcaacgttaccgggaaggctgcatacagcacgaacgggcggaatttccctttcgggccgatcttgcgccgggaatcgagcatgatcccggtgcccatgtcggtgaaggcggtaaaaaacttcgcaatcaggaagataatcccgccgtaggtgccaggcagccccagcacgtcggtgtagaacttcagcagatacagcgtgccgatatcaagcaggatgttagagccgagatcgcccatcccgtaggcgagtttttctttaaacggcaggcgcagggttgccggatcagaagtatgttgactcattattgttctccgtctgcccgcaggtttccccgcgggcgagccttatcagatatgacgtaaggtgctaaacagatctgcccattcgctgtgctggcgatagaagaccggcggtttgccgagcggggcatcaacggtgatgtcaccgccctggcaggtttccccggtccacgcattgacccaggtgtcctgcggcagatagagcgaccagtcgcggcgtccctcttcatgaaccggcgccaccagcagatcgcggccaaacaggtactggtatttcagcgtgtaggcgcgcgcgtcgtcctcgtagtgcaggaacagcgggcgcatcaccggtaggccgctcttcgcgttctgcgctaccgcagctttgatgtacggcttcagagtggtgaagacggtggtcatgcgcgcgaagtgggcgatagtttccgcgtcgccatcgaactgccagttatcgccagggcggttgccctcgtgggtacgcatcatcggcgtaaaggcgctgaagtcgcaccagcgcagcagcagctctttgctgcgcttcatctcgaagagggtcgtatagccgccaatgtcgctgtggtgcagcccgtgcccggtcatcgccagcgacagcgccgccggtacgacggacgccagaccatcgtccaggctccagtcgacgttctgatcccccgcccacatcatcacagagtgcttctggctgccggtgtagcccgcgcgcatgaagaacaggatctccccgagcttgccggtctcctccagcgcttcgtagttacatttcgcccacagggcaggccaggcgttatgcatgatctccgcgctcacgccgttgtgcaggaaggtatcggtcggcagatattccccgaaatcggccatccagccgccgcagcccagttcgatcaggttctttttgatcacctctttgtaccagctgtaggcttccgggttagtcaggtcgataacgcccgcgtagaactcgccgaactcaacgtggtaatccttgccgtcggcatctttggtcagatagccgcgcttcgacgcctcttcgcagagatctttatcgctggcgacgtacgggttgatataggagaggaactgcacgccttcctctttccactgcgcaatccgctcatcaagctgcggatagagcgcgctgttccacttccagttccacattacgcgtttgccaaaggaggtcatccggatgccggaccagtcctgcgcccagatgccgtttaccttcacgccgccctcgcgcatggcgtcgagcttctgctgacacacctcggtgccgccctgaatacccagcgtcacgccgtcgtaaacccagtccggcagttcaggctgacgccccagcaggccggtcagtttttccagcagatcgacgtaggtttctgcgcattcgaagcgcagcgtggcgttatcttcccagaatgctagctcgtggaagtccggcgcgctgaagtcgaagttcatataacagctgttatccacgtggcagtagtacttctgggtgctcacgaaggtaggctgtgggaagaaggtccagtagtagtcgccgcccgcgttctctttgcagtcggcctgccaggtgacgtaggtctgcttattgcggcccacgccctgctcgctggtccacagcgggaacggcttgccgcgcagatcgaaatacgagaactgctcgccgcagccgtagatatgatcgtcaggctgagccgccagccgcagccagatgcggttatggctggcggcgtcatttttcagcttcagctccagacggccctcaccatccacgcccaccagcagcgtcgcgctcaccgcgtcgccgcgggtaaagcggattgcccagcccgcgctttgctgcgtgacggtcgcgttcgtcagggcaatcttttcgttaagcttgtctttgatgctgaaattgccgcgaaacatctcgatatccgcttcgcctgcaccgatccacaggcagggggcatccgcagagtgggataaaatcagacggtcctgccagcgcagggtgaaaccactttcgttatttttcaggtcaatattgtgtagggtacgcataaaaactccgtctttattatttggccaggctatccagtaatccggcggctacggcaggggctaagcccggcgccagcggcaggcgggggatcaccaggcagtgcagcaggtggtaaatatcctgcttgccgtcccagactttggtggtcacttcgttattggtgtccagctcctgccaccatgaaccgttttcgtaatccatcaggtacttgatgcagtaatcccaccatttctgataccaggcttcgtactgcgcctcgctggtgacggtgtagagcgcgtaagccgtgcccatcgcctcgacgattggccagcgcacgcgttcgcgcacgataggcttgccgtcccagcccacggagtagacaaagccgtccgccccgtcgggtgcccaggcgtcgcgaatagtggcgtgaaacaggcctttcgcatcttccagcagccactccggcggggtttcaaagcgggcttccagcgcggcacgcaggtgcagcatcaggcggccccactcgatccagtgccccggcgtgccgccgtaggcgcggaagcggtgggcagggttatcgatgttgtaatcgcggatcgggttccagctggtgtcgaaatgctcgttaacgcggtactcccctttgcgcgccacgtcgtgaataatcaccgaggcgatacgcaaggcgcggtcgagccatttccggtcgtgggtcacgtcatagacgatgaggaaggcttccacggcgtgcatattggcgttaccgccgcgatagtcttccgttttgctgaaggcttcgtcccaggactccaggcacatctgctcctgttcgctccagaagtagcgctcaatcacctcgatggcattgtccagcagcttgcgtgcctgcgggtggccggtggtgacggcgctcgccgcgcccagcaggacgaagaagtgctgatagccctgcttggacgcatcaatcacgccttcatcgtttacgcaggcgtaccagccgccgtgctgtttgtcgcgcagcgggccgttcagggcattgatgccgtgctcaaccagggcatacgcgccgggacggcccatgttcgccgccaccgcgtacacgtgcagcatgcgggcggtgatccacagatgggtgcccatatcgctgcgcacctgcccgttattgcccagccagccaaagccggttgctacggcggcgtttttaccgaaatcgagaatgcggtcggtctcttgttcgagccagcggttatggctcagggtgttaaaccatttcatgttcgggtcctttcttaacggcgagccatcatttcgtcgacgatctcacccagacgctgaagttttggcacggaaatatcacgcagcatcagctcggtgtccggcaggccaatcaccgatgaccagacggcgcgcccggctaaaaagcccgatgcccccgcctgcatggcgacgcttacggcacgcgggaataacttatcgtccacgccggaggagaggatcacccacggcatggcgatgttctcgttcagcttctgcgaggccgtcagtagctcgtgctgcgtgcccttaccaaacagcggcatttccactttgtagaggtcggcaccgctgtcgcccagctctttggccgcatcgataatcgcctgctcgcggtcaaacgcggcgccgcggcgcgggggacgcaccaccggctcgataatgctcagcagcccgttgtcgtggcacagcgtattgaacgctttcaccatttccaggcgctgctgcggatcttcatcgctgcgccacagcaccagcagcttcagcgccttaccgccatcgcgtttgaccgcctgcgcgtcaacgttcttgtcgatcaccacgctgtcgaccggaatgccgttccccgggataaactcgtcggcggcgacaatcattgcgcagcttttggccacggcctgctgctcgacaatctggcggtagcagaactgctggtcgacgaggatcgcagaggcgtacggcgacagaattttcgccgcattgaccttgaaatccgtcaggtgctggtcggttaccggcaccggcgcgcctgcggcagcaaacatcaggcgcatcgcttcgcgctgatccacggccagcatcgcaaaaccgccggaaggtcgggtgatatctttcagggtgtacatcgtcattcctcagtcctttcgtatcagtgtgattttttcagcccggcagatgcgcgaacctgttcaagaatggctgtccagtcttcgcgcccgcgcccggcggcgcgtgcctggttgtaaacttcgcgggaagccgcgcccagcggcatcggaacgtggagctggttggccacgtcgagggcgatccccagatccttatgcgcaaggtcgatcataaaggcgggtgaaagatcccctttcagtaccttgttcggccatgacgtggtgaagtggcctttacccgccggcgtgccgctcatcaccttgagcgccacgtcaaaggagaggccaagcgcttcgcacagtacggcggcttcggcggaaagggcgttcagggcgatgctcatgtagttattgatgagcttcacgcggatgcccatgcccggcccgccagcgttaatcagttcattgcccatcgccattaagacgggggtggcgcgctcaacctgctgcgccgtaccgcccgccagcaggagcagcgtaccggcgatggcatgatcagaggtgcgtccgacgggcacgtccatcaggctgaagccttgctcagccatgtcgcggatcagcgcgtcggtttgcagcgggtgaatggtggacatatcaatcaccagcgcgtcgcgggataacccttcgcacacgccgtgcttgccgaacagcacgctgcgcaccaggtcgccgtttggcagcatagtgatcacgaattcggcatccgttgctgcctgtgcgggcgtagccgccgcccgggcaccgctctctaccagcgcctgaaccgcctgcgggttcacatcaaaaacgttaagctggtggccctgtttcaacagattcttcgccattggcgcgcccatctgccctaaaccgataaatgcgattgctgacatgcctctctcctgtcacatcgtgtcaatttttgcgcgtttgtggtgtctgtttttgatcgtatttgtaatttatagtcaaaaaattgacacgggtcactttttaaacatttggtgaaattaaaatgaaggcatcagaaatcgcagaaggaatcaccatgactcgcatcgtttgtgtcggcattaccgtgctggatcgcatctggtatctcgatgatttaccgaaagaaggtgggaaatatgtcgcaaaagactatacggaagtgggcggcggcccggcggcaacggcggcagtggcagccgcaaaactgggcgcggaagtggattttattggccgggtgggggacgacgataccggcagacgactgcttgcggagctggaatccctgggggtgaacacccgctatacgcgcatagttaagggagcccgatcgtcgcaatcggcggtgctggtggacgcaggtggggaaagagtgattgccaactaccccagccccgatctccctgcggcggcagactggctgcatgaaatcgacttctctcagtgggacattgtcttagccgacgtgcgctggcatgacggggcaaaacaggcatttaccctggcccgccagcagggcgtaccgacgctgctggatgcggatgtcaccccgcaggacatcgcggatctgattgccttaagcgaccacgcggccttctccgcgccaggactgcggcggttaacgcagctggatgaaaccgaaaacgcgctgaagaaagcacaaacgctcacaaatggacatgtgtatgttacgcaggggcgagacggctgtttctggctggaaaacgacacgctatgtcatcagcctggttttgaagtgaacgtcattgataccaccggggcgggcgacgtgttccacggtgcgctggcggtcagcctggggcagaaattacccgccgcagacgccgtgcgttttgccagcgccgtcgcagcactgaaatgtacaaagcccggcgggcgcgcgggtatacccgactgtgatcaaacccgctcttttttgtcactttttgtataaaatgcggggcgtgatggttttcagagaacagcccatgagccttaccgaactgaccggcaacccgcgtcacgatcagctgctgacgctgattgccgatcgcggctatatgaacattgatgaactggcgcagctgctggatgtctccacgcaaaccgtgcgccgggatatccgtaagctcagcgagcaggggctgatcacccgtcatcacggcggcgcgggcagggcatccagcgtggtcaacacggcgttcgaacagcgtgaagtctcgcttaccgaagagaaacgggcgattgccgaagcgattgcggactatattcccgacggttcgaccatttttatcaccatcgggacgaccgtggagcacgttgcccgggcactgcttaaccataatcatctgcgcatcatcactaacagcctgcgggtggcgcacattctttataagaatccgcgctttgaggtgatggtgcccggcggtacgctgcgcccgcataacggcggcattatcggtcctgcggcaacggcgttcgtgtcaggatttcgcgcagattacctggtcaccagcgtcggggcgatagagcacgacggcgcgatgatggaatttgacgttaacgaagccagcgtggtgaaaaccatgatcgctcactcccgtcacattttactggcggccgatcatacgaaataccacgcctccgcggcggttgaaatcggcaacgtggcgcaggcgacggcgctgttcaccgatgagctgcccggcccggcgctgcaaaatcacctcaaatccagcaaggttgaggttgtcgaagtcaattccggagaagagcagcaggctggctgaaaatcctatggcccgatattgcgattcgggcctttcctttctctaagctgaatctggcgcatagctaaagtttctctttcccgctacagttacttttccacggcgaaaggagataaacatgctttatatctttgacttaggaaatgtaatcgtcgatatcgattttaaccgggtgctgggcgcatggagcgattttagccgtgttccgctggcgacgttaaagcagaatttcgcgatgggtgagactttccatctgcacgagcgcggtgagatcagcgatgaagcgttcgcagagcgtttctgtcaggaaatgggtctctcgttaagctacgagcagttttcccacggctggcaggccatatttgtcgcgatccgccccgaagtgatcgacatcatgcacaagctgcgcgagcaggggcatcgtgtcgtcgtcctgtcgaataccaaccgcctgcataccaccttctggccggatgaatacccggaaatccacgcggcggcagataaggtgtatctctcccaggatatggggatgcgtaaacctgaggcgcgcatctacctggcggtattgcaggaagaaggattcacggcggcggatgcggtcttttttgacgacaacgccgataatatagaaggggctaatcagttaggtatcacctccattctggtgaccggaaaagagacgataccgaactactttgcgaagcagttatgctaaaaaccgttcatcaaaaagccaatcaccacacgcgcccgctgagggcgtggctgaaactcctctggcatcgcattgacgaggacaacatgaccacgctggcgggcaatctcgcttacgtgtccttgctctcgctggtgccgctggtggcggtgatttttgcgcttttttcggcgtttccgatgtttgccgatgtgagcatgcagcttcgccattttgttttcgcgaactttattcctgccaccggcgatgtgatccagaactacattgaacagtttgtcgctaactccagcaagatgacggcggtgggggcatgtgggcttattgttaccgcgctgctgctgatgtactccatcgacagtgcgctcaacaccatctggcggagcaaaaaagtccgcccgaaggtttactcctttgccgtctactggatgattttaacccttggcccattgctggcgggggcaagcctggcgatcagttcctaccttctttcgctgcgctgggcgaccgacttaaacagcgtgatcgataacgtgctgcgtatattcccgctgattttatcgtggctttcgttctggctgctctacagcgtggtaccaaccacgcgcgtacccaaccgggatgccgtggtgggtgcgctggtcgcggcgttgctctttgagctgggcaagaaaggattcgcgctttatatcaccatgttcccctcttatcagctgatttacggcgtgctggcggtgatccccattttgtttgtctgggtctactggacgtggtgtatcgtcttgcttggcgccgaaataactgtcactctcggggtctaccgcgaactcaaaaaagcagcagaagctgaaaaacaacaagaagcagaccaaccatgattgcattgattcagcgcgtaacccgtgccagcgtcaccgtggcggatgaggtgacgggtgaaattggcccaggacttttggtgctcctgggtgtcgaaaaggatgacgacgaacaaaaagccaaccgcttgtgtgagcgcgtactgggctaccgcattttcagcgatgcggaaggcaagatgaacctgaacgttcagcaggcgggcggcagcgtgctggtggtctcccagtttacgctggccgcggataccgaacgcggcatgcgcccgagtttttcgaagggcgcggcaccggatcgcgcagaagccctttacgagtactttgttgagcgctgtcgccaacaggacatgaatacacaaaccggacgattcgctgcggatatgcaggtttcgctggtgaacgatggccccgtcacattctggctccaggtatgagccaactggcggcatggccgcgggtaacaagagagagtacagctatgtatcaccttcgagtaccgcaaacggaagaagaattagacgcttattaccatttccgctgggaaatgctgcgcaagccactgcatcaacctaaaggctctgaacgcgacgcctgggacgcgatggcgcaccaccagatggtggttgatgaagagggcaacctcgttgccgtgggacgtctgtatatcaatgccgacaacgaagcttcaatccgctttatggccgttcatccctccgtgcaggacaaaggccttggaacgctgatggctatgacgctggaatccgttgcccgtcaggaaggggtcaagcgtgtcacctgtagcgcccgcgaagatgccgttgagttctttgccaagcttggtttcgtgaatcagggggaaatcaccgccccgcaaactacgccgattcgtcactttttgatgatcaaacccatcgccacgctggacgatattctccatcgcgccgactggtgcgggcagctccagcaggcgtggtatcagcacattccgctcagtgaaaaaatgggtgtgcgtattcagcaatataccgggcaaaaatttattaccaccatgccggaaaccggcaaccagaacccgcaccataccctgtttgccggcagcctgttttcactcgccacgctcaccggctggggactgatctggctgatgctgcgcgaacgtcatctcggcggcaccattattctggccgatgcccatatccgctacagcgccccgatcagcggcaagccgagcgcggttgctgacctgggcgcactgggcggcgatctcgaccgtctggcgcgtggacgtaaagcacgcgtacagatgcaggtggagctgttcggcgatgaaacgccaggcgcggtgtttgaaggcacctatatcgttctgccagcgaagccgtatggcgcgtatgaagagggcgggaacgaggaggaatagtctccttctcactctcgcccggcatggttaatgcgccaggcaatatctcgcataacgtctcgcgctgactggctaattccacccaactggaagaagccgtgtattacaccccaccatcgttgagcggtacacttcacgccttgctccgtgaggcgctgataaagcgcctcgccttcgtcgcgtaacggatcatattccgcggtaacaatatggaccttcggcagaccgctaaagtcgttgcgccacagtgggctgacttcaggatgttgacggtcggctccagccagatacatttcatagccgctcaaaagggtatcgcgagtaatcacgtaatccatgccattgagggtatagctttcaaaactggccgtagcgtcgagcatggggtagataagaatgagctgcgcgggatcccagagacctttggccttaagccgcaatgacgttaccagcgcaagatgacctcccgcgctgtctccacaaagtgtaatccggtttttatccacacctaattgttctgcattttgccagacaagatctgccgctctctctgcatcgtcatgcgcagcggggaaagtatgctcgggtgcgagtctgtactgaaccgcaatgacccggcagttaccgtaaaacgccagttggcgaagctgattatcatgggtttcaaacccaccgctgacaaaacaaccgccatgatagtagagggcacaagataacgtttcaggggcattgaaaggcgaaaatacccgaaaggtcatatcctcaagaacaagcgtttcaacctggacacgcgtttctgtttccccggctagcgctgtgctggcgacatatccgcttctccggtcatcaatactctgctttcgcgaggaaggtcgtcctgtggcaataaactcctgtaccagcttatcaatacccttttccagtgccatgattacgtccttttactgtgtttttatacagtttatagcctggtttacagcagatgaaaacagagaaatgttgagaggtgcatattgtggaaagcggctcgcaaaatcgatcattccctaaaaaacgtcctttcaccctaaattgataaagagtattttgcctgaaaattaaccaaagatgatatactaaggtgatatatgagcgttttggcggaacttgatatgggcagaatacttatcgatttgtctgatgacgtgattcaacgtttggataatctcaagcaattgcgaaatcaaccacgtgctgaactgcttcgggaagcgatagagctgtatctcgaccagcagagttcttctgttatccgaaatgcgcttggtctgtggggagacagaaaagaggacgggcttgagtatgaacgcaagctgcgtgaggagtggtaatcatggagcacatggcagtgtttgataccaatattctcattgatctcttcaacaaccgtattgaagctgcggatgcgattgagcataccgcgtcgcatcgtgccatcagcttaattacctggatggaagtaatggtgagcgctcgcaggcatggtcatgaagcgaaaacggcagccgttatgggcgcttttgaaattattgatgtgtctcgggatattgcggaaagaagcgttttactacgtgagaagcatggaatgaaactgcctgatgctatcattctggccacagcgcagagcagaaaatgtccgttgatttctcgcaacacgaaagattttgcgggtattgacgaggtccttacgccttaccaggtgtaggccgggcaagctcgcgccgcccggcactctcacaggagattactccccttcacccgggaacaggaacgggttgatcgagctgcgggcaaagccctcctgctccatcttcgcgtccagaatcagcgaggcgagatcgtcggccacggcttcgactttcgggtctttttcctgatacagaatcttcaggtaggtcccgcagtcgccgcagctctccgctttcaccgccgcgtcttcattttccagcgaccagtagttcagatcgcgggtctgttcgcagttgctgcacttgatgcgcaccacgtgccactcggtttcacacaggttgcagtgcaggtagcgcagcccctgagtggtgccgatttgcaccatgctggagaccggcattgaaccacacaccgggcagaactggcgcgcttcgccgtattcggcgcgggctttacctggaatcaggctcgccatttgcgcccagtagagcgacagcgcagcccagatgaacggcgctttatcgctgctcaccagtgagaagtcggaagcaaacagcgcgctcgccatctcttccagctcctgatcggaggctttttccaggttctcaatgactgccagcgccgtgccgctcatctcgggcttcagctcggcgatcagggaatgcagcagcttatgccagtgcttgtcgcgcggcaggacgtgaatatccagcggcggtttgccctgctcgttggcttctttgatgcgtgcggtcaggtccatttgcagcggatggtcgtacagcaccacttcctgcgcatgggcgaccagcgcggcaaaacgcagaaaatcgcccagcgggttgttctctgctagctcgcgcagacgctctgcgcggcggttgtagaggttcttgagtctggggaataacaacggcggaatatactccgccgtacgtttctcgctcgaccccagctcatcttgcgggattatgcgaatactcattcagatgacttttcctgtttctggcggacttctcggtaccagcgcgggtgatgtttcttcgcccacgttttggtgacccagccttccaccatcgcggtaatggtgcctttcacccagagggcggcgtaaatatgcaccatgataaccacaattaacgccactgcggcaaatgaatgcagcatcagcgcgaatcggatcaccgggattgagaaagcaggcgcaaagtacggacgccagatgatcacgccgctcaccagcaacaggaccaggaagataatcgccgcccagaatacgcatttctggccgaagttataacgcccggtatcacccacttcctcgttgacgacgatcttacgaatattcttcgcccaaaagatatcatcccgattgattaggttatggtgccagtagcggaaaaacatgatgatgaacgaggcaaacatcaccacacccacgaacgggtgaaggatgcgcgccagctgcggcgtgcccagtatctgcatcagccagttgaaggacgggaagaagaaccccagcccgcttatcgccgccagcatgaagcagaaggcggtgacccagtggttgatgcgttccggcgcggtgtagcgcacgatggtgtcacgttttctcatttgcgcacctcgtctttctcttcatgcaggttgtcgtcttcctcttccgcacggttcggaccaacgccgacgtagtggaagatgctcgctgcgaaggtggccgcaaaaccgaccgcggccagcggtttccagatacctttccagaacttcacggtcgcgctgatttccgggttctccggcaggccgtgatacaggttcggcttgtcggcgtggtgcagcacgtacatcacgtgcgtaccgccaaccccggccggatcgtacaggcctgcgttatcgtaaccacgggttttcagctcgcccacgcgctctgccgccagcgttttcatatcctctttggagccaaagtggatagcgccagttggacaggtcttcacgcacgctggctcctggccgacatttacgcggtcaacgcacagcgtacatttgtagacgcggttgtcttccgggttcaggcgcggcacgtcgaacggacaacccgcgatgcaatagccgcagccaatacactgctcggactggaagtcgacgatgccgttggcatactgaatgatagccccttctgacggacacgccttcaggcagcccggatccgcacagtgcatacagccatctttgcggataagccattccagtttgtcgttctgctccacttccgagaaacgcattaccgtccaggacttggcggtcaggtccgccgggttgtcgtacaccccgacgttgtgacccacttcgtcacggatgtcgttccactctgaacaggccacctgacaggctttacagccgatacaggtggtcacgtcgataagcttcgccacttcctgctggtggtcccgcgcctgaggcgcgggcgtgaaaccgttagtcgcggaacgacggataatgtcttgagattgataagccataagtcgtctccgttacaccttttccacgttcacgaggaaggccttaaactccggcgtctgcgtgttcgcatcaccgacgaacggcgtcagggtgttcgcaatgaaccctttcttcgccacgccctcataaccccagtgaattgggatgccgatggtatccacctgctgaccgtgaacgttcagcgtgcgaatacgcttggtcaccaccgccttggctttgatgtagccgcggttagaggagaccttcacggtatcgccatgggcaatgccgagtttgttcgccagcttctcgccgatctccacaaactgttccggctgcgcgatggcattcagcagcgcgtgcttggtccagtagtggaagtgctcggtcagacggtaagtggtgccgacatacgggaacttgtcctttttacccagcgcttcaaaatcgcccttgaagatgcgggctgccgggttagagaccacgttcgggtgcagcgggttggtacccagcggcgtctcaaacggctcgtagtgttccgggaacggaccttccgccatcttatcgatagcaaacaggcgccccatcccttcaggctgcatgataaacggcccgacatcgctgcctggtgcggcagtgctgtagtccggaatatccacgccgccccatttcgcgccgtcccacttcagcagctgacgcttcggatcccacgggttgccctgcgggtcagctgaggcgcggttatagaggatgcggcggttaagcggccatgcccatgcccagcccagcgtattgccgaggcccgacgggtcggcgttatcgcggttggccatctggttgccttttggcgtccagctaccggcaaagatccagcagccgctggaggtcgtaccgtcatcgcgcaggtgcgcaaaggtgctgagctgatcgcctttcttcgccagcaccgcaccggtcgccgggtcgataacgtccgccagcgccttaccgttgctctccatcgccacttcttccggagacggattctctggcgtcgagtagttccaggtcatgttcagcaccggctcaggcgttgcgccgccttcagccgcgtacattttacgcagacgtaagaagataccggccaggatctcgccgtcgttcaaggcgatgcccggggcatccgcgcctttccagtgccactgcaaccagcggccggagttgacgatagacccgttctcttccgcgaagcaggtagacggcagacggaacacttcggtctgaatcttcgacggatcgacatcgttcgactcaccgtggttctgccagaacgtcgacgtttcggtattgagcgggtcaatcgtcaccaggaacttcagcttcgacagagactcgacaaccttgttcttgttcgggaacgacgccaccgggttaaagccctggcagatatagccgttgacctggccctggtgcatcatttcgaagtactgaagtacgtcgtaacctttgtcccacttcggcagccagtcaaagccccagctgttttccgccgtcgccttgtcgccgtagaaggctttcatcagcgagacgaagaacttcggatagttgccccagtagttcacctggccttcgagcagcggttttggcgtgctggccgtcaggtaggtttgcagatcggtctgtttctcgctcggcaggttcatgtaacccgtcaggctctgagacagcaggccgaggtcggtcagaccctgaatgttagagtgaccgcgcagggcgttcacgccgccgcctgccatccccatgttgccgaggagcagctgaaccatcgccatggtgcggatgttctgcgcgccgatggagtgctgcgtccagccgagcgcatacaggaacgacgcggttttatctttcgcgctggtttccgctatcagctcgcacaccttcaggaagtccgccttcggcgtcccacagatgttttcgacaacctccggcgtatagcgggacacgtgctctttcagcaggttccacacgcagcgcgggtgttgcagggtggtgtcgcgcttcgcaaagccgttttcgtccagctcgtagttccagctggttttgtcatatttgcgtttttcggcgtcataaccgctgaacaggccatcttcgaagtggtaatcctcacgcacgatcaggctggcgttggtataagcttcggtgtactcgcggttatatttttcgttggtcatcaggtacagcaatacgcctgacaggaaagtgatgtcagtacctgaacgaattggggtgtagaaatccgccactgacgctgtacgcgtaaagcggggatcgatcacaatcagcttcgcgccgttgtggattttggcttccatcgcccagcggaacccgacagggtgcgcttcagcggcgttaccgcccatcaccacaatgaggttggcgtttttgatgtcgacccagtggttggtcatcgcaccgcgaccaaatgttggagcaagacttgctaccgttggtccgtgtcagacacgcgcctggttgtcgaccgcgagcataccgagtgcgcgcgtaaatttctgggttaaatagccggtttcgttactcgacgctgaagcacacagcatgccggtggagagccagcggttaacggtggtgccttcggcattcttcgcgataaagttggcatcgcggtcttctttcatcagcttagcgatgcgatcgaacgcttcctcccagctgatttgctgccatttgtcagagccgggagcgcgatactcaggaaacttcaggcggctttcggagtggataaaatctaccagaccggcccctttcggacacagcgcaccacggttgaccgggtgatccggatcgccttcgatgtggaaaatggatgctttggcgtttttcgcaccgtcgccgaggctatacattaacagcccacagccgacggagcagtacgtacaggtgttacgggtttcgcgggtgcgcagcagtttatactgccgtgtttccgccagcgctacaccgggcgcaaagcccagtgccgccgccgtggtgcctgccataccgccagcgcagatcttaaagaactgccttctgctgacctgcatgggtcactccttggttcattacgacattgctatgtagttttactttgcggttgagaattaaccgcaaaggagaaaaatttgcattaatccctcatttctccgagggataagcccagaataccacaatgtcggtacgcctgttctaacggggttaaaacaaagtgaacgtattatcacggcattgattataaaatgtgatatcaatcacattttatcctgtgcatgttaaagaggtgtagcagctgatcggttgcacccctccgtattgagtaggagaatggttgctgaaaagttgatccatactatgcgtaaggcctgccgtttgtgttgcaatagcaggctcacttccgtggttgttcaggaataccgttgtgtctaaacaaaaccgtgctgcccacgtgtcgccactgcctgcgggcattgtggaactgtcggtacacagaccgcctcacatttcacatgccacgccggattttctggcggaagaggtccccgttgccctggtttacaacgggatttcgcatgtggtgatgatggcttcgccgaaagatctggaactgttcgccataggtttttccctctcggaaggcatcattgcgcatccgcaggagatctacggtatggatgtggttcaggcctgtaatggtcttgaagtacaaatcgaactctccagtcgtcgctttatggggctgaaagagcgccgccgggcgctggccggacgtaccggctgcggcgtgtgcggcgttgaacagcttaacgatatcggtaagcccgtcgcgccgctgccgtttacccagaccttcaacctcggtaacctcgacaaagccctggagcacctcaatgatgtccagcccataggtcagctgagcggctgtacacatgctgcggcgtgggtgctcccgtcgggcgagatcgtcggaggtcatgaagatgtgggccgccatgtggcgctggataagctgctgggccgtcgcgcgcgtgaagatgccgtctggcagcaaggggccgcgctcgtttccagccgcgccagctatgaaatggtgcagaaagcggccatgtgcggcgtggagatcctgtttgcggtgtcggctgcgacaacgctggcggtcgaagtggcagagcgctgcaacctgacgctggtggggttctgcaagccgggcagggcgacaatttacacccatccgcagcgattaattgttaatcagtaattttgaatgagtatagcaaaaccttccgcttttagttgttcatgatgagggctagtatttatctcatcaaggcacggtgccttatctaaacaacttaacgaaaaggtttatctcatgaaaagcatcaaaacttttgtcgctgtaatcgctctggctgcttctttcggttctttcgctgcgcagactgtgactgcatccgcctctacgctggatggtgcagaagctaaaatcgccgcacaggctcaggaagcgggcgcgtcatcctacaaaattacccaggcattcaccggtaaccgcgtacacatgaccgctgaactgaacaaataagtcatatagccgctgtcccttgctcttcggagcagggacaggtttcattctgctcccctgtttttatcccgccttcctgtacaaaccgcctgtattttcaacctgacagaagatagccatatcctccgggatatttcttattggttgaataataactataatgtgccgtccggttgagttacccttacttaaaaatcagcaatatcatacatgatctaaataaaaggtctgaccagttcttttaattcatttcaacaatgtatgatttcatgtctttcagactgtatttcggggtttattatataaataatcaataattgatcccaaataataaggaaatcctcaggctttaatcctaaagagattcggagtcattgaccccggttattcatgatgatagtttcaaaaacaatattaaatctttacccctaaaaccaaatatttctcttttggtttattttgtatttaactcatataaggaaattaaatgaacgcgatgtttaaaaaaggagtgctggcatctgtactggcagtagcggcgtcttcagcaatggcggcttccagtgttgatattcaggttacggggaaaattgttccgtcttcctgtacaccggcatttattagcggtggcggtattgctgatttcggtaccatgaaggtggctagtctgaattccaccaccccaacccctctggcggatgttaaaattatccctatttctattacctgtgaagaagcgacccgcgttggcgtgacctttaacgattcgcatgtggattctgcgcctacggagaatatgccggtgaactttattgattcggatttcattaccagtgcgggttttacggctggcctggggatgtatggcgataagaagattggcgcttattcaatgggtatccaaaagaccgacggggcgacgaccaacggagacggtgtaaacctttatccaatcttcaccagcgataacggcgcatcatggggagttaaaagcgggtttcgctacttacaggtgaaacctgataagagtgagatttattccttcacagatcaagcgaccggtacagtggcacctgttgcacaaactaaaattaacttcaacgtgggcattgccgcgatgattaacccaaccaacgatttaaatatcacggatgaagctaccctggacggcttaaccaacgttgagctggtttatctgtaatcacccccacgtatcatgaaatacctgacacctcacttcggtggggtgtcctataccaatattaatggactaatattatgctgcttttaaagagaacgctgatctgtgcctgcctgctggcctcattcaacggtatggctgccgggatggtgccggatacctcgctgcttattgtcaatgaagacaagcagggggccagcatggatgttaaaaacaccgatgctgaagcacagctgctgtacaccaaaattattgatctcccggacgaccccaaaccgggtctgattgccacgcagccggttgtgcgcgtagatgcgggtaaaacccagcgcgtgcgttttgtgctgaaaaacagtaatgagccgctgaaggtggaacattttaagcgtgtcatttttaccgctatccctcagcgtgaaaaaaataaagttaaagtggtgtttagccagaaccttcccgtcattattcacccggctggcctggcggtaaatattgaaccctggaaggcactcacctggcagataaaaaatggcaatgtcacggttgagaataatacgccttatgtcgtccgactggagcaaaaggtgaaattaatggcctcgggtacgatcgcgacattagctaagacttacattcttcctggcgaaaaaatgacggccagcgccccagccaaaatatcagcatccgaaaaacaaatcgaaatctatccggcaacgcgttatggctataaggcagggaattatatcgccgaccttcagcaataaaatcacttaacaaacatggagtagttatgttaaacggttcctgtaaaaagggaatgctcgtgttttgccttagcgtgctggcatttaatattcgggctgagatttcctctaatgcgaatgaatctctggaactggcgcgagccatatttgacagcgatgctttaaaaaataacgggcttgatccggccattgcggattactattccctcactccccgttttacccctggctaccataatgtgacggttaatattaatggtaagcagcgcaatattatgcccgtgaaatttgatgaggaaggaacgccctgtattgataaagcgtttctggaaaacgcgggcctgattaaacagacgaaaagaggcacctgcccgaagatttatcactactggtccggatcaacgattcagacttcgccggatattgatgaaatatcggttgttgtaccgcctgaagcgatcgaccctgattatgaccgacagttcgccgaggtgcgtggcggacgtgcagccatgctgaattactccatgtttggcacccataatcactatgatgatgagaacgctgaccgtttccagtcgacctttgaaatgggctttaatgccggagactggattgtgcgcagcacgcagttcattagcgacggcagcgatcaggattttgatgtcgactccctctacacctatgcccagcgtacctttaccgattatggcgtgatggtgcagggtggccagattaacatcgccaacagccgcttcagtattccgggaatttacggggtccagatgatgccggataccgcactcactcctcaggtggggacgggcgtcgaagtcagcggtattgcccgtaatccgcaggcgcgcgtcgatatccgccagggcggacagcttatttactcaacgctggttcctgccggtccgttcaacctggatgacgtgccgctggcgaacctcaacaccgacctgaacgtaacggtcaccgagactgacggcagcgaaaaccgattcactgtctcggcaagtacgttccgcagcaatcatataggccgtgccccgggctttacgctggctatgggccgcgttgaagacatggactcacgctttgaaaatccgtgggtggtgtccgccaacaacggctggtctgtcaataagcgtgtcaatttcctggccggtatggtgatggcggataaccactattatggcttctccggcaacctcgataccataccgatgcagaacctgtatgcctcgttgggttttctggcgtcaatagacaaccagacgcaaaccgacggcaacaaaacgacgctggatctgggttactccctgccgtggggcattgggctttcgctgggcggtagctatggcacaccggactatcgcgagatggcggaactttacggcgacgatgacgatatgtcgcaaaccaaatacgacaccagcgtcggtatcaactggtcgagtaccacgctgggccgcttttccctcagctattatcgcaacgagagctggaacagcgactatgacagtcgccggtttatctcgtcgtggtcacagacttttaaatacttcaacgtgagcgtgaactgggagtcggatgtcagccggcacgacagcagcgacaacgatcagttttacgtaaacgtgtcgatcccgctgggacgctcaggcgtgacaaccagctcctggtatcgcgagagcgaaggtaagcgttcttacggcacgcgggcgatgggctcgctcaacgctgagaaccagtacacggtgggggtcactcaggaccaggaagaaaacaccaccagctgggacagctcgctgaacagtaatctgcattacaccaacctggcgctggcggcaggaggagataacgacagcaataccaactactcagcagcattaagcggcgggattgtcgcccacagcgacggggtgaccttctcgccttaccgcgtgaccgatacgtacgccattgccagactggataaaccggtggctggcatcgagataggtaccccgcgcggcgcggtatggaccgataaatggggccaggcgattattcctgcgctgtcgccgttccgtgaaagcacgattgagatcaacacggaaagcctgccaggcaatctggacgtaagaaatggcagaacagcgatcaaagcgtctcacggcgctgtggcgaagtgggagtttgcgacgttaagccagcgccgcgtgctgctcagtatacgccgtgcggacggtacgccgctgccggaaggtgtctcgattgtggacgcggcaggggagtatgtgacgagtgcgccagaagacggcgtgatcttcctgaacgatatctctgccagccagcagctgtatgcgaagctggatgaagggcgttgcaggctgacgtacaccctgccggaggcagaaccgaataaattctatgaagaggtgacagggaaatgtctctgaataacgttcgtcaatacgcgctgatgcttatgctgctctgcggtgcagcgggactttcgggtgtggcgcaggccgatgacggcgcctgtgaaatgatgtcggcggtgaagaaagtcgattacgggcgctatcgtaaagaggatatgcggcaaacgtccgctgagcatatcggcaaagtgtataacggttatgcttctgtgatgcgtgaagttcaggtttcggtgctgtgtccggatgcgcgcaaaatgcgcatctccgtagacgggattgcccgacagaacctggcgtatcgttttacggataacggcgcgatgaaaatcgaatttaaagatgggcgggtggacgggaaccccgtgcagctggccgcggtcgatatcggcgcggttgctgttcagggtggcgcgtctcaggtgacgctgaagccggaaaaagcactggctgcggtaaacggcacggaagtggcgggtgagcagtttgtcgccaccatgatgatcacgacctatctctctgacaaggcatttagcgttactaacaccacggattttgaagaaacgctgacgcttaacgtcgatacgcttcctgcgcattaacccctcagatgcccggcagcgctgttctgtcgggcatttttcttagtggatccccgccagacgcagcagcgccgtcaccaccgccgccgcgacgatcaccacaattaacggcattttgcgccaggccagaaacaccgcgaaccccacccccagtacgcgcgccatcccggcaaaatggtccccttcataaaacgttgttgccagcgcgacggagaataataaaacggttgccgcgtctgaaagcagcgcctgcgaccgttcagaaagcgccagccggctaccgagtttcgccccgccgagacgcatcagataggttccggcagaaagaatggcgatgccgagaataaagaccgtcatgttttccattattttttcctcgcggcaaggccgagcaaagagagcagcaccggcaggccaaccggcgcaaacggtacggcggccagcgacaacactgcgccgctacaggcgcggatcagcgtggtacggtttttaaatgccggcaccactaacgccagcaggatcgccgggaacaccgcgtccagcccgatggtttccgggtccggcagcagcttgccgaccatcgcgcccagcaccgcccccagcggccagatgattgccacgcccaggccgcacagccagtaggccgctttacgctgctcggcggttttttgcgacaggccgaacaccacactttcatcattcatgatatgacagcccagaaagctcaggccgcgcttgcccaccagttcacgcaccgtaacgccgaacggcacatggcgcgcgttaaccagtaaaccggccgctgccgctgccagcggattgccgccgctcgccacgatgccgataaacataaactcggatgcgcctgccagcaccgtgagggagaggacaaacggcacccacagcgggaaaccgtaggccatcgccagtgagccataagacatgccgaccacgcccaccgcgaggcagaccaggacgatcgcttttatcgtgtcgcctttcaggcaagagaggtgattcttcataccattttagccatatcgaacgtatttccattataatgaacgcatcagaaacgttttacaagacgaacgattcgttcgttatagagagaaagaggccgttattatgacgcagccaatcagcgtgatcgccaaaagtctggtgcgagagcgcctgcgaaccgggctctcactggcggaaattgcccgccgtgccgggatcgccaaatccacgctttctcaactggagtctggcaacggcaatcctagcctggaaacgctgtggtcgctttgcgtggcgctggatattccgtttgcccggttactggagccgcagcaacccgtcacgcaggtgatccgccgcggcgagggcacaaaagtcgtcgctgggcaggcgaactacgaggcgattttgctcgcggcgtgtccgcctggcgcgcgtcgtgatatctatctgctgctgactcagccgggggcagaccgtatttcccagccccatccgcctggttcggttgagcatattatcgtgacccaggggcgggcgatggtcggtctgatcgacgcggcggaagagctcggcccgggagattacatttgctaccccgctgaccagccgcatatctttaaggcgctggagccagatacgcacgcgctgctggtggcggaacaaaactaacaaagatacggaaaatcatgtcgctcaaagccattgccaaagaactggggctgtctgttaccaccgtcagccgcgccctcaacgggtatgacgacgtttctgctgagacgcgcgcccgcgtggaagcggaggcccagcgccgtggctaccgaccaaatacctttgcccgtcgcctgaagatgggcaaaatcgacgccgtcgggctggtgtttccggtgcatcctgttccgctcaataacagcgtttttatggacatggtcggcgaaattagccacgaactggcgcgacatgagattgacctgctgctcatcgctgacgacgatctggcggacaaacacagctatatgcgcatggtgcagagccgacgcgtggatgcgctgattgtggcgcatacgctggatcacgatccgcgtcttgagcagctacaggccgccgggttcccgttcctggcgctcggccgcagccagctcccgcagccgtacgcgtggttcgatttcgacaactatgccggcacatatcaggccacccgctggctgatcgagaaaggccatcagcgcattgcgctgctgggcgaaagcaacaaccaggcattcatcacccagcgccgccagggctacctggacgcgctgcgggaagccggactttccagcgaatggctgcgcgccatgcccccttcgcgtcgcgtggggtatgccaccacgcaagaacttctctccctgccgcagccgcccacggccatcattactgactgcaacacccacggcgacggcgcagcgatggccctggcgcagatggggcgcttaaccggtgaaaatgccgtttcgctggtggtctatgacggcttaccgcaggacagcattgtcgatatcgacgtcgcggcggtgatccagtctacccgtcagggcgtcgggaaacagattgccgatatggtgcgccagctgattaacggcgacgacatcgacacccttcaggtgctctggcagccggaattttccccaggccagacggcctgattacaccaaaaattcaaaacccgatcacagatccgaaacgttttggtttgtatccgaaacgtttcggatcaacactcaggacatcccgatgacaggagatgtctgatgcaagattccatttttcgacttgaaagcaatacggttgacgtggtggtaaaaacccacccgttcgccgaaattctctactgggggccacaccttcagcacttttcgccgcaggatgtgctgagtattgcgcgcccggttgctaatggcaggctggacgtcgactcccccgtcacgctgatggcagagctggggcatgggctgtttggttcgcccggcatcgaggggcatcgccaggggctggacggatcgcctgtcttcaccacaacaggcgtacaacagcaggggcaaaccctgacggtaacggcagaagataaacaggcgggcctgcgcctgaccagtgaattaacgctggatgccagcggcgtactggtggtgcgtcatgggttaaccaacctgaaaatgcaggcgtggcaggtggatcgatttgccgtgacgctgccggtggccgaacgagcgcaggaggtgatggccttccacggacgttggatcagggagtttcagccgcaccgcgtgatgcttgaacatgacagctttgtgattgaaaaccgtcggggtaaaacctcccatgaacatttcccggcgctgatttcaggtacgccgtcattcagtgaaatgcacggcaacgtctggggtatacatctgggctggagtggtaaccaccgcctgcgcgcagaggcgaaaaccgatggccgccgctatatgcaggccgaagcgctctacctgccgggtgaaatggcgattgaagagggggaaacgctctggacgccgcgcctgtatgccagccactccccgcacgggctgaacggcatgagccagcagttccaccgctacctgcgcgacaatgttatccgcttcccggaagataaaccgcgcccggtgcacctcaacacctgggaggggatctacttcaaccacgacccggactacatcatgcgcatggccgacgaggccgcagcgctgggtgtcgagcgctttatcattgacgacggctggttcaaaggccgcaacgacgaccacgccgcgctgggcgactggtatctggacgagaaaaaatacccgaacggcctaaagccggtaatcgatcacgttaaacagctcggcatggagtttggtatctgggttgagccggagatgattaacccggattccgatctgtatcgcgcgcaccctgactgggtgctggcgctgccgggctacgcccaggcgaccgggcgacaccagctggtcctcaatctcaatattccgcaggcctttgaatatctggtcgaacgcatgagctggctgctgggcgaacacgcggtcgactacgtgaaatgggatatgaaccgcgagctggtgcagccagggcacaagggcaaagccgccgccgacgcccagacgcgccagttttatcgcctgctggacgtgctgggcgagcgcttcccgcacattgagtttgaatcctgctcctccggcggcgggcgaatcgattatgaagtgctgacccgctgccaccgcttctgggcgtccgacaacaacgacgcgctggagcgcaacactatccagcgcggcatgagctacttcttcccgccggaggtgatgggcgcgcatatcggtcatcataaatgtcacgccaccttccgccagcacagcattcagttccgcgggctaacagcgctgtttggtcacatggggctggagctggatccgctcaccgtcgatgcgcaggagcgtgaaggctatcgccattacgccgcgctgcacaagcggtggcgagaggtcattcatcacggcacccagtggcgcgtggatatgccggacgccaccaccctggcgcagggtatagtgagcgaagataagacgcaggggctgtttttggtcagccagctcgcgatgccggattacaccctgatgatgccgctgcgcatgccggggttagacgccagcgcgctgtaccgcatcacgctgctcgatcacccgaacatccagattacgggcgagggcgggcacaccatgcgtaagctgccggcgtggatgaacgcgccgcaaacggtaagcggtgagtggctgatgcaggcgggtattgcgctgccgattctggatccggaaaccgccattctgattggtgtggaacgcgtgtaagggtgacgggccgggcaaccggccctccgttgaggataaaaataatgaacacaacaacctgtacccacaaagacaaccctaatttctggatcttcgggctgttcttctttctctacttcttcatcatggccacctgctttccgttcctgccgatctggctgtcggacatcatcggcctgaacaaaacccataccgggattgttttctcctgcatctcgctgtcggccattgccttccagccggtgctgggggtcatttcggacaagctggggctgaaaaaacacctgctttggatcatctcggtgctgctgttcctgttcgcgccgttcttcctgtacgtcttcgccccgctgctgaaaaccaatatctggctgggggcgctgagcggtgggttgtatatcggctttgtcttctcagcggggtcgggggcgattgaggcctatattgagcgcgtaagccgcaacagcttttttgagtacggcaaggcgcgtatgttcggctgtctcggctgggggctgtgcgcctcaacgggcggcatcctgttcggcatcgatccgtcgtacgtcttctggatggggtcggccgcggcgctgttgctgatgctgctgctggtggtcgcgaaaccgaagcctaaccagacggcgcaggtgatgaacgccctgggcgcgaatcagccgcagatcaccgctaaaaccgtctttaccctgttccgccagcgcagaatgtggatgttcatcctgtacgtgattggcgtggcctgcgtgtatgacgtcttcgaccagcagtttgccaccttcttcaaaaccttcttcgccacgccgcaggaggggacccgtgcctttggtttcgccaccacggcgggggaaatctgtaacgcgatcattatgttctgctcgccgtggatcattaaccgcatcggcgcgaaaaacacgctgctgattgccggggtgatcatggcgacgcgcattatcggctcgtcgtttgccaccactgccgtggaggtgattgccctgaagatgctgcacgcgctggaagtcccgttcctgctggtgggggcattcaagtacatcaccggggtgtttgatacgcgcctgtcggccaccatctacctgattggcttccagtttgccaaacagtcggcggcgatcttcctctccgcctttgccggaaatatgtatgaccgggtcggcttccaggagacgtatctgatactgggctgcttcgtgctggcgatcacggtggtgtcggcgtttacgctgagtggcaggcgggagattgctgccgcctcgggggcagcagcgttaacacatcagtccaggtaaaacacctctttcagcgccgaactcaccgggctgttatccgggttcgacggcataacgtcacccatatatttccaccagcgctggcagacatcggtgtttgccaccgcgttccagcgctcttccgattcaatctccaccgtcgcaaacagcaggttgcgagctttgtcgagatagatggcgtagtggtgcgcgccgtgggctttcagtaccgcctccagctcaggccagatcgggttgtggcgacgtgcgtattcctcgtgcgcgtccgggtttacctgcatcacaaacgctttgcggatcataaagcctccaggtacagctcgcggacctcatcgcggctggcggtgcgcgggttgcacggcgcgcacgggtcggcgagggctttatccagccagccttcaatatcggctttggtgacgccgagctggctaaatccggacggaatgccgacccgggcgctcaggtcacgaatcgcctgaatggctgacatgctggccgcttcatcgctcatgccgcgcgtgtcaacgcccatcgcctgcgccacgcgggcgaaacgtgcgaccgcgttcgggcggttaaagttttcgatgatcggcagcagaatggcgttgcacacgccgtgcggcaggttgtgcgtcgcgcccggctggtgcgccagagcgtgtaccagacccagaccggcgctgttaaacgccatgcccgccagatactgaccaaaggccatctgctcgcgcgcttccaggttgtgaccgtcgtcgaccgctttcggcagccagaggttgatcaggcgaatcgcctccagcgcgttggcatcggtcagcgggtgcgcgccgacggacacgtaggcttcaatggcgtgggtcaaggcatccatgccggttgcggcggtcacggaggccggaatatcgagcatcacgctggcatcgtccacggcgatatccgggatgatgttcgggtcgataatcacctctttcacctgtcgcgcggcgtcaatgatcaccgcgttgctggtcatctccgccgccgtgcctgcggtggtgttgatcgccaccagcggcacgcccgcatttttcaccttgccgacgccggagtaatcggttgacgggcccgggttggcggtgaggattttgattgccttggcggtatcaatcgggctgccgccgccaaaggcaatcaggtaatcacactccgcatcctgatatgccgcatagcctttttgcaccagcgcttccgtcggattcgggaatacctcatcgaacaggtgatacgacatctgatgggcgtcgagcgcggaaaacaaactgtcgagcaggccaagtttcaccagctggccgtcggtgacaatcagcgcttttccccactgtttgtttgccaccagattgaccatatcgccgatcgcgcccgcgccgtgcaggctgattttggggagtgccaacataaagctcatgataattctccttaattactgtgatttttatgcccggcggcgctgcgcttgcgcgggcctacggttaagcaggccgggtaaacgcagtgccacccggctatgagatccgtcttcgctgcatcacccggcgggtaataatcggcagcgaaatcaccacgatcagcatcgcgccgataatcaccgacatcacaatgccgggcacgttgagcaggctcaggccgaaggtcaccagccccatcaggaaggcggcgataatcacgcccaccatgctgccggacccgccgagaatattgacgccgccgagcaccgccatcgtcaccaccgccagctcccagcccatcgcgatggtcgggcgggtactgcccagacgcgaggtgagcagcaccgacgccaggccggacatcagccccaccagcgcgaagaggatcaggttgtggcgcttcacgttgatgccggagtaccacgccccggtcgggttgttgccgatggcatacgtgcggcggccaaaattggtgcggtgcagcacaaaggcaaacagagcggccagcacgataaacagcgcgaactcaaacgacagcgcaccccagacgtagccctggccgaaccaggcgaagctctccgggtagctgttcagcgcctggtccccgagcaggatgtaggtgatcccgcggtacaggctcatggtgccgatggtgatgacgatggacgacaggttaaagcgcgtcaccagaataccgttgaacagcccgcacagtagcccgacgcctaatcccacgcacaccagcagcggcgtatcgacgcccgctgccgcgcaaaagcccatcaccgtggagctgagcgcgatggtggaggccacagacaggtcaatttcccgggcgataatcagcatcgccatcggcaacacaatgatcgctttttccgtgaagttgaacgtcgcgtcggagaggttccagatattgaggaagtagggcgaggcgagcgcgttcaccacaaacaccgccagcgtcaccgccagcaggaagccctcccagcacagcaggcgctggaagatgcccggcgcagaagtgggtttgaactcttcagatgtcatcattttgctcatggtttcaccgccagtttctgacgtgccagcgccgcgtcgcgcaggatcagcctgcctttgcgcctgttgccgcgctcgttcagcagcacagcgatgacaatgaccgagccggaaatcgccatctgccagaacggggagacgccgatcaccggcagggcgttgttgatgacgccaaggaacagcgccccgaacagacagccgagcacgcggccggtgccgcccatggtgctgatcccgccaatcacacaggctgccaccacctgcaattcaaaaccgttagcgacgtcaacatacgcaacggcaaagcgtgatatccacaggtagccgcagaacccggccagcagaccggaaaggcagaagctgatgaactgcattttcccggcgttgatcccggtgtagtacgctgccgtggcgttcccgccggcggtgtagagcgcccgtccggtgcgactgtagcgcaggaagtagcccaccagcagcagtacggcgatggcgcaccagctcagcaccggcaggcccagcactgacgcacgcggcaggccgaggaagtctgcacccatctggttggagttcacccagccgccgccggagagcaaaaagatcattccgcggtagatgctcatggtgccgagcgtcaccacaatcgccggaatgcccagtttccacaccagcaggccgtttattgcgcccatcagcagcccaagcgcgctggcaaggatcagcagcgcccagacgggcacgtccgggtaatggaaattaatcagggcgacaatcatcccggtcagggccagattagccgccatcgacaggtcgatgcctttagtgagcagcaccatcatctgcccgagcgcgaggacgatcagaatggcggtgtcgttaaacatctccaccaggttgcccggtgcgataaacgatggcacgcggctgccaatggcgacgaccatcaggacaatcaccgcgccaagcagcgcctcgcggtgttttaagagtgagctaagcatttatgccgcctcctgttttgcaccgctggcggcgctgacgatggtttccgccgtcgcgtctcccgcctggtattcggccaccatcagcccctcgtgcatgacgataatgcgatccgccatgcccatcacttccggcagttcggacgagaccataatcaccgccagcccctgactgaccagctcggacataaactgatgcacggctgcctttgagccgatatcgatgccttttgttggctcatcgaggatgatcacgtcagggtgcgtcgccagccatttgccgatcaccaccttttgctggttgccgccagagagggtctccaccgcctgcttccagctgaaggctttcacttgcaggcgcctggcgtattcgtctgccagcttccattcgcggtcgtcgtgcagtacgccgttcggattgagcctgctgagctgaggcaggctgatgttctgggcaatcggcagggcgataatcgccccctgtttctgcctttcttccggcacacagacgataccggccttgatcgcatccgcaggctggcggaagcgccggggctgtccgttgaggataatttccccggacgatggccgcgtgacgccggaaagcgcctgcatcagctcggtacgcccggcacccaccagcccgtaaaagccgaggatctcccctttacgcagggagaacgagatatgcgcaaactcggtcggatggcagaggtttttcacctccagcaccgtctcgcctttttcgcagtcgattttcgggaaggtttgggtaatggcgcgcccgaccatcatcgacaccatccgctcctcggtgatctcatttattgcccctgcaccgacgaacacgccgtcgcgcaaaatggtgtagtgatcggccagctcaaaaatctcgtcgaacttgtgggagataaacaggatggcttttccctcctgctttaagcgctccacaatctggtaaaactcgaggatttcatgctgtgacagcgccgccgtgggttcatcgaggatcaccacctgcgcctcaaacgacagcgcgcgggcaatcgccaccatgtgacgctgggcgatgctcagggttttcagcgttgcgcgcgggtcgatttgcacctcaaggcgggcgagaatagcctgcgcccggcggtgcatttccggccagtcgagctttttcaggaagcctttgtgaaggtactgaccgacaaagatattttcggtgaccgagagttcatcgaacaggacggtttcctggtgaatggcggtgatgcccattttatgcgccgactccggcgtcggaaggtgaacggggatcgccttgtagagaatttcgccctcgtcgggctggtatatgccggtcatcactttgaccagcgtcgacttgcccgcgccgttttcgccgataagcgccgtcactttgccgggccacagcgcaagctgcacattctcaagagcacgcacgccggggaacaccttggtgatgccagaaagctgtagcaatggggtcatgatagttctcctggacaggggaatttgtagggcgggtaagcggcagcgccacccgccttttgccggatggcgctacgcttatccggcctacaaatcgcatcaaaagatttttgagaacttatcaatattgctggcatcgtaaacgaacggctcggccatcgcgccgttgccgtcggcatccagcttcactttgcccagtttgcccatgctggcctcgcctttcgtggcgttgcctttcaccaggtcatccgccaggtaggttgcggcatagcccaggtcaatcgggttccagatggcaaagctcttgcttgcgccggacttcaccgcgcccgccatctcagacggcaggcctaaaccggtgacgtacactttgccaatcttgccctggtccttcaccgcctgcgcggcagccacaatgccgacggacgacggtgaaacgatcactttcagctccgggtaggttttcagcaggccgaccgcttcgcggtagctcttgtcagagagatcgtccccgtaggccacggtcaccagattgacggacgggtacttcggcagcacctttttcatctccgcaatccaggtgttctggttggtggaggttggcgtggcgctcagcaccgccacatcgcctttctccacgttcagcgctttcagggcatcggcggcgagcttgacgttagtttcgccaatcagggcgttattggacgggttgaggtggatctgacgcccggctttcgccacgccggaatcccacgacacaaccttgatgccgcgctgcatcgcttttttcagcaccggcacgacggcgtccggatcgttcgcggaaatcgcgatcgcatcaacgccctgggcgatcagcccgttcagcacctcgatctgcgcttccgccgtggtggtggtcgggccggtataaatcacttttacatcgcctaactctttggccgcctcctgcgcgccgacgttcgctgcctcgaagaatccattccctaaggacttcgccaccagggcgattttcacttctgctaaagcggaaccggacaacgccagagcggcaacggtgaggatcaagcttgcttttattttcattgcttttactccactgacttgagttagttgtagggattgcaggtggttttcgccccgtctcggtgagcggggcgcgatgttgttattggtacaaatctaacgccgactgcatgggggtgacgccaaagcgtttacccagggcgatcagttcttcccgggtgatggtctgcttcatgccgcccatggaatagacctttaccagcacttccgcggatttctcggcggtgtcgatcaggccgaaggtttcatccagcgtcgggccgctgccgaagacgccgtggaacggccacagcaccagtgaatgtttctgcatgtccgtcgcggttgcctggccgatttcgtcggtgcccggcaccatccacggcagaatgccgacgccgtccgggaacaccaccagacactcggtgctgccttcccacaatttgcgggtgaagaaatcagaattgttttccagcacgtaggtcagggcgatcaggttggtggcgtggcagtgcatgatcacgcggtccttgccattggtcgccttgatgcgctcgcagtgggagaggaagtgcgccggcagttctgaggtgggcaccgcctcatccgtcagcccccacagaatgtggtagcccgcgccgtcgctatccactttcactacgccgaggttggcctgcgggtcgagctggacgttgcggaagaacttcccggaaccggtgacgataaacggcgtgttggcgagcagcggcatcggctggctcagggcgatatagcgcggcttctggtggaaatcggcggcaaatggctcgatatccgcatcgtccaggcgtagcgtcaggttgccgccgttgcgctcgtcccagcccttcagccaggcgtcggaggtggctttgatcatgccctggacgaaccaggaggtggtgatggtctgcatactgtgtttcctttgaaaatgccgggtggcgcgttgcttacccggcctacttttacctgtaggcccggcaagcaacgcgccgccgggcaatgttttttactgacgagcggcaagaacgtctttctcatatgcccgcacgttgtccagccactggctgcccgcaggcgcatcgtgacgctggcagtacatctcccacaccgcctgccacggcagggatttctgctcttccagcagcgccaggcgcgcggtgtagtcgccgttttcttccagctgtttcagggcggcgacaggctccagcagcgcgcgcagcagggctttcttcatgttgcgggtgccgataacccacgccgcgatgcggttgatggaggcgtcgaaaaagtcgaggccaatgtgtacgcggtcaaagaggttgtggcggatgatttcgctggcaatggcctgggtttcgtcatccagcagcaccacgtggtcgctgtcccagcgcaccggacggctgacgtgcagcagcaggcgtggcacgtagagcatggcggcggagatcttgtcggagatcacctcggttgggtggaagtggccggcatccaggcacagcgcggtctggcggctggtggcgtaccccatgtagaactcgtttgagcccacggtgtagctctctgcgccaatgccgaacagcttgctctcgacggcatcgatgtggtgcgccgggtccagcttctcgctgatggcttcatccagcgcggccagcaggcgctggcgcggggccagtcggtctacggtgatatccttcatgccgtccgggatccagatgttcatcaccgacggcgtgccaagctgctcgccgaaatacgcagaaacgcggcggctggctttgacatggtcgatccagaactggcggatttcgtcgttggcgtgcgcaagggtaaagccgtccgcgctcagcgggtgcgagaagcaggaggggttaaagtccaggcccagcttgttggctttcgcccacgccacccagttcgtaaagtgctccggtttgatttcattacgcgccaccggctcgtcggattcgagataaatggcgtgcagattcaggcgctttggcccggggatcaggctcagcgccagctccagatccgcacgcagttcggtggcgttgcgcgctttgcccggatagttacccgtggcctgaatcccccccgtcagggaaccgcccgggttctcgaagccagcaacgtcatcaccctgccagcagtgcatggagacgggcagacggtcgagctggcgcagcgcctcttcgacatccacgccgacggcggcgaaacgctgtttagccaggtcccaggcttgttcaagttgagtggtcatgcgcaaagctccttagtcagtcgtttttgctgaaactgcgcccggtagcgggcaatttcatggcagggatggggggtgaaggtggtcaggctgttattcgccgtcaccaccgaacggaaatcgtcgacgtttgaaagttcgtccagggtcatcagctgaatgccgatattgccgagcgtggaggcttcaatcggacctgccaccacggtaatgccgcaggcatccgcgcagagctggttcagcagctggttctggcagccgccgcccacgatatgcagctgcgtgaacggtttgccgcgaaggtcagccagctcgctcaggatgtcggcatagagcagggcgagactgtcaaaaatgcagcgcgccagctcggcggggcgggaaggtaccggctgccccgcttcaaaacaggcggcctggatttcagcgctcatgtgcgccgggttgataaagcggtcgtcgttcgggttaatcaggaaggtgcaggccttcagcgtttcggtttccgcgataagcgcgggcaggtcggtgatgttctgctctttcagcacccgctggagcagccacaggcccatgatgttcttcagcacccggtagcgcccttcggcgccaccttcgttagtgatgttcgccgccagtgcggcatcgctggtgtagggtgttttgctctcaaagcccatcagcgaccaggtgccggaagagaggtacgccgcgtctttgccggcgagcggcgaggcaatgaccgcgctggcggtgtcgtgactggcgacggcgacaacagggatttcattcccctgtgggcaaagccagtggccgatcacattgcccggatgggttggcgcgccgaaccaggacggcgaggcgcccgtccaggccagcagatgttcatcccagttatcggtgttgatgttaaccagctgcgtggtggtggcgttggtgtattcccagttcatgttgccggtcagacggtagcttaagtagtccgggatcagcagcgcatgcgccaccttttcgaccagctctggctgttgctcaaccagcgcgcgcagctgatacagcgtgttaaacggcagaaactgaatgccgctgcgaccatagatgttctccttgccaagctgggcgatggcgtgcgccattagcccatcggtgcggctgtcgcggtaggagacgggcaggccgacgcgttcgccgtgactgtccagcagtacgtaatccacaccccaggtatcaatgccgatactgtcgatgcgaataccgtcttcgcagacgttgtgaagtccggtgcggatctctgcttccagggcgtcgatatcccaggtaacaaaaccgtcctgtttttgcagacaattggcgaaacggtgcatttcgcgaagcgtaagggtgtgcaggtcgcagtcccaggtggcgagcattacacggccgctggatgcgcctaaatcgacagccacacaatggcgaaaagtcatggtcgggtcctttcttaagtcattagcgaggagtgtaagaaagggaagaaatagccaccttctcgccactgacagcccaaatctcgcgctggcaagaaagcaaagatgaacgtgagggagttcacagtttccagtaatggcggggtttgcaggcagtgtgacgctgaccgcatttcctgatctttccgcctgtttcttgaaaaaccgacagcttttgcgcggtttgctgtcaaaaatttaaggtgagcgtggaaggccttaattactattttgagaacttttctcattggtgggggccgttatgaccgtactgcacagcgtcgatttttttccttcgggggcttcgccggtcgcgattgagccacggctgcctcaggctgcgttcccggagcatcatcatgattttcatgaaattgtgattgttgagcacggaacgggcatccacgtgtttaacggtcagccgtataccattagcggcggtacggtgtgcttcgtgcgcgatcacgacaggcacctgtatgaacataccgacaacctttgcctgaccaatgtgctctatcgttctccggatgcgttccagtttctctccgggctgaatcagctgttgccgcaggagaaggacggtcactacccctcgcactggcgggtgaatcagtccacgttgcagcaggtgcgtcagctggtgagccagatggagcagagcgaggatggacaggagacgcacgccattgctacccgcgagctgctgtttatgcagctgctggtgctgctgcggcgcagcagcctggtggaagggctggaaaataacgacgcgcgcctgaatcagctgatggcctggctggaagatcattttgccgaagatgtctgctgggaaacgctggcggatgacttttcgctctcgctgcgcacgctgcatcgtcagctcaagcagcataccgggctgacgccgcagcgctacctcaaccgtctgcgcctgatcaaagcgcggcaccttttacgtcataccgacgaaagcgtcactgatatcgcctatcgctgcggattcggcgacagtaaccacttttcgacgctttttcgccgggagtttaactggtcgccgcgcgatattcgtcaggggaaagacgcgttgcttcagtaacgcgagggcagtcaccgtttttttgcggcaaaaaggctaataatgtccggttattcgccgtagaggttgtggtgtggctgctcagctcattcttcgcaaagatgatttttttgcctccgcgagtcaggccgtcgcggtggccgaccgctacccgcaaaacgtctttgccgagcacacccacgagttttgcgagctggtgctggtatggcgaggcaacggcctgcacgtcctcaacgaccgcccctaccgcatcacgcgcggagacctgttctacatccgcgctgaagacaaacactcctacgcctcggttaacgatctggtgttgcagaacgtcatctactgccccgacagacttaaactgaatgtcgactgggcgggcaatatccccggttttcatgatgccagaggcgaaccgcactggcgcttaagcagcaacggcatggctcaggtacgccagacgatttcccagctggagcaggagagccagaagagcgatccggtggcaaaccagatgtcggagctgctttttgcccagctggtgatgaccctgaagcggcatcgttacgctacggataatccctctgctaccacgcaggaagcgctgctggataagctcatcacccggcttgcgggcagtctgaacaagagtttcgtgctggaaaaattctgcgagcaggagcagtgcagcgagcgcgcgctgcgccagcagttccgcacccagacggggatgacggtcaaccactatctgcgccagctgcgcatctgccacgcccagtacctgttacggcatacggagctgatggtgagtgaagtggcgatgcgctgcggctttgaggacagtaactacttttcggtggtgtttaaccgtgaggtggggatgacgccggttcagtggcgtcatcgcagtcgaaaggcagcgtaatcagttcgccatgccgaggccgacgatattggccgcaatgataatcaccacacagcccaggctcagcacgccaaccggacgacgcccggcattgttccactctttcagcaccagcccaaccagcccgccgcacagcacgtagaagctcatgtgcagcatccagctcatgtagtcatactgcgccggaatactggcgtgaccccaggcgtagaagaagaattgcagataccacatcagaccgccgagggcggagagcaggacgttggtgacgatcagcggttttgccagcgagaagtcggcttttaccgacaggttcttcacttttgccagacgaatgaagcagaagccgaggtttaccaacgcgccgccgcccatgatcaccacgtagcttggcagggcaacgtacagcggatcgacgcccagcgccgcagcggcgtcgtgcatcggtttggcggcgttcatggcgaacgacatgcccgccgagaagacgccgcacatcaccgccagcagcagccctttcttcaggttgaactcttcggctttgatgcccatcttgcgttctttcagctggcctgcgcgggtgacgatgcccacgccgatcaccgccaccagcacgcccagcagcgtcattcgcccgccctgagtgttgatcagcacgtcgaagtggccgttgaggattggcgtcatcagggtgccaacaatcagcgtaatgccaatcgcgatgccaatccccatcgacatgcctaggtagcgcatggtgaggccgtagttgatattaccgatgccccacatcgcgccgaacaggaataccggcagcagggtggaggcgttgaaggaggagaagtagccccagaaatcgggcagcagcatggcgctgattgtccacggcaaaatcagccaggacacggtgccgccaacggaccacatggtttcccatgaccagcctttcacctttttaaacggggcatagaaacaggctgcactggccgcgcctatcaaatgccagaaaatacccatcgtaatcgcatgattcatttttacatcctcatcgtttttatagccggaggcttcccgccgacttgatgagtgtaaaaatgaggcggtttgggaaccttcagaaggttgccgcacttttgttcaggatggcaatcagcacgttaagcacgtgagcagactcacaattttgtcatttatcaaaaatctaataaccttataaaaactacggcattgataatcattttcaatatcatttaattaactataatgaaccaactgcttacgcggcattaacagctgtgccgcccgacaataatggagaggattatgagttatacactgccatccctgccgtatgcctacgacgcactggaaccgcatttcgacaagcagacgatggaaatccatcacactaaacaccaccagacctatgtgaacaacgcgaatgctgcgctggaaagcctgccagagttcgctaatctgcctgttgaagagctgatcaccaaactggaccagctgccggcagacaagaaaaccgtgctgcgcaacaacgcgggcggtcacgctaaccacagcctgttctggaaaggcctgaaaaccggcaccacccttcagggcgacctgaaagcggctatcgagcgtgacttcggttccgttgacaacttcaaagcggaattcgaaaaagccgctgcaacccgtttcggctctggctgggcgtggctggtcctgaaaggtgacaaactggcggtcgtttctaccgctaaccaggactccccgctgatgggtgaagctatctctggcgcatccggcttcccaattctgggtctggacgtgtgggaacacgcttactacctgaagttccaaaaccgtcgccctgactacatcaaagccttctgggatgtagtgaactgggacgaagcagcagcgcgtttcgccgctaaaaaataaggttgcattgacgcctgtgagaagcgagtctgatgactcgctttttttgtatctgaaggagtggagatgcattacccggtgaatgtgtttacaggcaaggtaagggagtacgaaggcagccgcccgagcgccatcgccaaagtgcaggtcgacggtgagctgacgttgaccgatctcgggcttgcgggtgaccagcaggctgaaaagaaaatccacggcgggcccgatcgcgcgctgtgccactatccgcgcgagcactatcagcactggaaagccgaatttcctgaacaggcggacctcttcgttgccccgcgtttggcgaaaatctctcaacggaggggctgacggagaagaacgtctttatcggcgatatttaccgctggggcgatgctttgattcaggtcacccagccgcgctcaccgtgctttaagcttaattaccatttcggcattcaggatatgtcggcccagctgcaaaacgcgggtaaaaccggctggctgtatcgcgttgtgcaggcgggacaggtttcggcggatgcgccgcttgagctggcttcgcgcttgagtgaggtgtcggtatacgaggcctgcgcaattgcctggcatatgccgtttgatgacgagcagtatcaccgcctgctgtcagcggcgggattatccaccagctggaccagaacgatgcagaagcggcggttaagcggcaagatcgagagcagttcgcggagattgtgggggaaagaggttccgtagaaagtaggccgggtaaggcgaagccgccacccggcacatacggttacgaacgcttatacagcggcagccacagcgttaacctcagcccgcccagcgggctgtcatcggctttcacccagccacggtgctgttgcatggcggtttcaacaatcgccagacctagccccgtaccaccagattcacggtcgcgcgcctcgtcggtgcggtagaacggacggaaaatctgctcgcgatcttccgggctgacgccaggaccatcgtcatcgacaatgacggtaatcccgtctttatccaccgaaaacgccacttcaatcttcgtgtgcgaatagcgcagggcgttacgcacgatattctccagcgcgctttccagcgtgttggggttaccgtagagcggccacgggcccggcgggaagttgacggtgaacgatttgcccatctgctccgcttcgaacgccgcgttgtccagcacctcatgccagaggtgattggctttcaccgtttcgctcaccagcgcgtttttctgctgattgcgagacatcaccagcagatcgttgatcatgctgtccaggcgatgcgcttccgtctcaatacgctccagctctttactctcaccgctgcggcggcgcagcagggcggtacccagctgtaagcgcgtgagcggcgtccgcagctcgtgggagatatccgacagcaggcgttgctgcgcggtcatcatgcggtcaagagcagagaccatctggttaaaactggttccggcggccaggaactcctgcggcccggattccagctccggatgctgcctcaggttgccctgcgccacttcgtccgccgcatttttcagcttacgcgccggtttcgccaggctccacgccagccataacagcagcggggaactgaccagcatcgtgacaatcaacagcaaaagcggacggtcaaacagcaggttgataaagtcggactgggaactgctcgcagggcgaatcagatagagctggtaattgtcttccccatcccgcaccgagaaaggaccgaccatctctacccgaccatatttctttttctgtgggtgatcggcgttatccgcctggccaataaagttgcggataatctgcatttcattgcgatcggccccaatcacgcggccttcactggtgaccagtaaaagacgttgtccggggggcgcccacttgtcgatagcgcgaaacaacctgcgccaccacattaaatcgttcggcggatcgtttgccagctccgcttccacgtgctgctcgatcatcacgccctgacgttgctcgctgtcgagtagctccgtcatctggcgtgagtcgagttttggcaacatcaaaacgagcattaaaaccagtgccagcgtcagccagaagatggcgaagatgcgggcggttaagctgcctatcatgaagcggaaaccatcagataaccacgaccacgcagggttttgaaccagggatgaccgtctttacgctccggcagcttacggcgcaggttcgagatatgcatgtcgatggcgcggtcaaacggggtgaggcgtttgcccagcacttcctggcttaagtgttcacgcgacaccacctggccgagatgctgcgccagcagatacagcagggtgaactcggtgccggttagctccagcgtttcaccgtcgaagctcgcttcctggcggcccgggttcaggctcagggagtctacttccagcgtaggcgagctgttgtcggtattctgctgctgctcgctccagtgagagcggcgcaggatcgcgcgaatacgggccaccagttcacggtcgttgaacggcttaggtaaatagtcatccgcacccagctcaaggccgagtacgcggtcaagctcgctgccgcgtgcggtcagcataatgacgggggtctggtgtgtctggcgaagctctttcaacgtatcaataccgtttttcttcggcatcatgacgtcgagcaaaagtaaatcgatgctgtcgtcaaggagactcagcgcctgttccccatcatgggcaaccaggacgttgaaaccttccatgtcgagcaactcctttaaaagagatgtgagctctcggtcatcatcaactaacaggattttattcattgtttaaatacctccgaggcagaaattacgacatcaaggctatctaatccatgactttacgttgttttacaccccctgacgcatgtttgcagcctgaatcgtagactgtctctcgttgaatcgcgacacgaaagattttgggagcaagtgatgcgcaaagttaccgctgccgtcatggcctcaacgctggccttcagtgcgtttagccaggctgctgtagctatcatcagcgataacggttcctcagcagagggcgcaacgcagcacagcagccaaagccatatgtttgacggcataagtttaaccgaacatcagcgtcaacagatgcgagatctgatgcagagggcaagacacgaccagccccctgttaatgttagcgaaatggagacaatgcatcgccttgtcaccgcagaaaattttgacgaaagcgctgtacgcgctcaggccgaaaaaatggcgcaggaacaggttgcccgccaggtagagatggcgaaggttcgcaaccagatgttccacctgctaacgcccgagcagcaagcggttttgaataccaaacatcagcaacggatgaaccagttgcgtgaggttgcacggatgcagcgaagctcagatatgacgcttttcagtagcaatagcagtacccgtagtaaccagtaaaccctgttttccttgccatagacaccatccctgtcttcccccacatgatgtgggggttttttttgcccatcgttcaggtttgttaacgctttattcatcctttcactccaccaccatccgttatactagcgccatggcatgacaggagtgtttatgaatcaatcctatggacggctggtaagccgggccgcaatagccgcgacggtgatggcgtcgtgtttgctgatcattaaaattttcgcgtggtggtacaccgggtcggtcagtattctggcggcgctggtggattcactggtggatattgccgcctcgctgaccaacctgctggtggtgcgctactcgctgcaaccggcggatgaagagcatacgtttggccacggcaaagcggaatcgctggctgcgctggcacaaagcatgtttatttcgggctccgcccttttcctgtttttgaccggcattcagcaccttatttcgccttctccgatgaacgatccgggcgttggcgtggtcgtaacggtagttgcacttataagcacacttgttcttgtaacgttccagcgctgggttgtacgcaaaacacaaagccaggctgtacgggccgatatgcttcattatcagtctgatgttatgatgaatggggctattcttattgcgctcggtctggcctggtatggctggcatcgggccgatgcgttgtttgcgttagggatagggatctatattttatacagcgcgttgcggatggggtatgacgcggtgcagtcgcttcttgaccgtgcgcttccggacgcagaacgtgatgaaatttatgccatcgtgaccaactggcctggcgtcagtggtgctcacgatcttcgtacgcggcagtcagggccgacccgctttattcagattcatttggaaatggaagacaacctgccactggttcaggcgcatatggtcgctgaacaggtggagcaggcgattttgcagcgtttccctgggtcagacgtcattattcatcaggatccgtgctctgtcgtacccagggcgttttgagctttcgtaattcgttgtaaaaaagtgagccagagcagcattttgtggataaattaccaccatatggcctgacctgaatcaattcagctggaagggattgatatactatttgcagtattcgacggttgaacagtttcttccggcagcagatttcaattttgcattcctaagttcagaggtagtcatgattaagaaaatcggtgtgttgacaagcggcggtgatgcgccgggcatgaacgcggcaatccgtggggttgtccgtgcagcgctgacggaaggtctggaagtttttggtatctatgacggttacctgggtctgtatgaagaccgcatggttcagctcgaccgctacagcgtgtctgacatgatcaaccgtggcggtactttcctcggttctgcacgcttcccggaattccgtgacgaacacatccgtgaagtggctatcgaaaacatgaaaaaacggggtctggatgcgctggtggttatcggcggcgacggctcctacatgggtgcaaaacgtctgactgaaatgggattcccgtgcatcggcctgcctggcaccatcgacaatgacatcaaaggcaccgactacaccatcggttacttcaccgcgctgggtaccgttgtggaagcgattgaccgcctgcgtgacacctcttcctctcaccagcgtatttctattgttgaagtgatgggccgttactgcggtgacctgactctggcggcggcaattgccggtggctgtgagttcgtggtggtgccggaagtggaattcagccgtgaagatctggtcgctgaaatcaaagccggtatcgcgaaaggtaagaaacacgccatcgttgctatcaccgagcacatctgtgacgttgacgagctggcgaagtacatcgaaaccgaaaccaaacgcgaaacccgcgcgaccgttctgggtcacattcagcgtggtggttccccaggcccgtacgaccgtatcctggcgtcccgcatgggcgcgtacgcgatcgagctactgcttcagggccacggcggccgctgcgtcggtattcagaacgagaaactggttcaccatgacatcatcgatgccattgaaaacatgaagcgtccgttcaaaggtgactggctggactgcgcgaaaaaactgtactgattggctctgttgcccggtggcggcaaggtaaatgcaaaacggtaacccttgggttaccgttttttatggttgctccctctcccgtgggagagggttggggtgagggcatcaggccgctcattcacttttttttattcctccacgttatagccaatctttttttattctttaatcatcggttagctttctggcacgctgcattcatcaaaacactacacaagagagctgggcgatgaataaatggggcgtggggttaacattattgctggcatcgaccagcgttctggcaaaggacattcagttactgaacgtgtcgtacgatccgacgcgtgaactatacgaccagtacaacaaagctttcgcggcgcactggaaacaggaaaccggcgataacgtggtggttcgccagtctcacggcggttccggtaagcaggcgacatcggtgatcaacggtattgaagccgatgtggttaccctggcgctggcttatgacgtggacgcgatcgcggagcgtggccgtatcgacaaaaactggatcaagcgtctgccggacaactctgcgccatacacctcgaccattgtcttcctggtgcgtaaaggcaacccgaaacagattaaggactggaacgacctgattaagccaggcgtgtctgtcattaccccgaacccaaaaagctccggcggcgcacgctggaactatctggcagcctggggctacgcgctgcaccacaacaacggcgatcaggccaaagcacaggacttcgtcaaagcactgtttaaaaacgtcgaggtgctggactccggcgcgcgcggcgcaaccaacaccttcgtcgaacgcggcattggcgacgtgctgatcgcctgggaaaacgaagccctgcttgcgaccaacgagctgggtaaagacaagttcgagatcgtcaccccgagcgaatccatcctcgctgagccgaccgtctccgtcgtcgataaggttgttgataagaagggcaccaaagcggtggcggaagcctatctgaagtacctctactcacctgaagggcaggaaattgcggcgaaaaacttctaccgcccgcgcgatgaggccgtcgcgaagaaatacgaaaacgccttcccgaaactgaagctgttcactattgatgatgtgtttggcggctggaccaaagcgcagaaagagcacttctctaacggcggcaccttcgaccagatcagcaagcgctaagcgttttacaaagaacgacacggtaacccggtgtgagaaatccgccgggttttttatttggtcatcattttgcgttactcttttgcctctattgaaaacagggaacgcgttgtgaaaaaaattatcttactgattctgatcgttatcgcccttgccgcaggcggcgtgtactggatgaaagcgggtaatccgaatgcgttgcgtcatatcgttctcgaccagtgtgtgcccaaccagctgcataaccgtaacccggcaccgtgtgcgcaggtgaagccagatgcgggctacgtggtgttcaaggaccgcaacgggccgctgcaatacctgctgatgcccacgtaccgtatcaacggcaccgaaagcccgctgctgactgagccgcagacaccgaatttcttctggctggcatggcagtctcgccattttatgagtatgaaacggggggccgacgtgcctgacagcgccgtttcgctgaccatcaactccccgaccgggcgcacgcaaaaccattttcatatccacatctcctgtctgcgcccagacgtgcgcgagaagctgaacgcgtcgcaggggcaaatcagcacccagtggttaccgcttccgggcgggctggaagggcatgaataccttgcccgtcgggtgacggagaacgaactggtgcagcgcagcccgtttatgatgctggcggaagagctgccggaagcccgcgatcatatgggacgcttcgcgctggcgatggcacagcagtcggacggctcgtttgtattgctggcgacagagcgtaacctgcttacctttaaccgcgcgtcggctgaggaattgcaggatcatcaatgcgatatcctgaagtgaccccaccataaatagcgtttactcgccctgcctgtcgccgtagacttgctgaaaaattctacaggagacaggtatgtcgctctggttaacgcatcctctgctgcttccctcgctgatcgtcggcgtcaccatcgtgctgtgggcgacgtcgctgttgccggaatttatcaccgcgctgctgtttttcacggcggcgatgaccgccagaatcgccccgccggaagtgatcttcggcggcttcgcctcgtctgccttctggctggtgttcagcggctttgtgctgggcgtggcgattcggaaaaccggcctggcggacagggctgcccgggcgctgtcggcaaagcttaccgactcctgggcgctgatggtggcgagcgttgtgctgctgagctatgccctggcattcgtgatgccgtcgaacatgggacgtattgcgctgctgatgccgattgtcgccgcgatggcgaagcgggccggcattcctgatggctcgcgggcctggtttggcctggcgctggcggtcgggtttggcaccttccagctctcggccactattttgcccgccaacgtgcccaacctggtgatgagcggcgcggcggaaggctcatacggtatccacctcaactatgtcccgtatctgctgctgcacaccccggtgctgggtattctcaaaggcctgattctgattggcctgatctgctggctgttccccggcaaccctaaaccggcgaaggatctcacgccatcggaaccgatggggcgtgacgaaaaacgactcgcctggctgctggcggtggtgttgacgatgtgggtgacggagagctggcacggcgttgggccagcgtggacggggctggcggcctcggtcatcgttatgctgccgcgcatcggttttatcaccggggaagagttctcggcgggggtgaatatgcgcacctgtatttacgtcgcgggtatactcgggctggccattacggtgacgcagaccggcatcggtgcggccgtaggcgaggcgttgctccatatcatgccgctgaatgcagaccgcccgtttaccagcttcctggcgctgacggggatcaccacggcgctcaacttcattatgaccgccaacggcgttcctgcgctgtacaccacgctggcgcagagcttctcggacgcgaccggcttcccgctgctgtcggtgatcatgattcaggtgctggggtattccacgccgctgctgccgtatcaggcgtcgccgattgtggtggcgatgggcttagggaaagtgcctgcgaaggcggggatgctgctttgtctggcgctggcgattgcgacgtatctggtgctgctgccgctggattatttgtggtttagcgtgttaggtcgtttgtagggcgggttagcgaagcgccacccgccacaaaggcaattacgcctgcttagccgcttctgccgctttaacgatcaccgcgaaagcgtctgctttcagggatgcgccgccaaccagtgcgccatcgatgtctggctgggtgaacagctcagctgcgtttgatgcgttaacggaaccaccgtactggatgatgacctgctcagccactttcgcgtctgcttttgcgatgtggtcacggatgaacttgtgcaccgcctgtgcctgcgctggagttgcagatttgccggtaccgatcgcccagactggctcgtaagcgataaccgcgccttcgaacgctgccgcgccctgggttttcagcacagcgtcgatctgacgtgcgcacacttcttcggttttgcctgcttcgttttctgcttcggtttcaccgatgcacagaaccgggatcagaccctgctctttcagcacagcgaatttcttcgcgatgaactcatcggattctttgtgataggtgcgacgctcggagtggccgatgatgatgtatttcgcgccgatatctttcagcatttcagcggaggtttcaccggtgaacgcgccagacaggttaacgtcaacgttctgcgcgcccagaatgatgtggctgccgtcagcggcacgtttagccagatccaggtacatatccggcggagcgatagcaaccgcgcagccggtcacgccagccagctctttacgcaggttagcaaccagttcgtttaccatgtggcggctgccgttcagtttccagttacccatcactaaaggatgtcgcatttcaattctccacgctcaataagcgaattaaggaatatggccgcccttaagggcagcatggtctgtgaatcagtatagagattttccctcgaaaggctttgctttttgtcattaattcgccccctcgagtgcgtctgatagggccagcttaatcggttcaaccgcgaaggtcagccccttttcgccgttatctgcgacgacatagcgaacggcaccttcggtatcggcgtaatagcgtttatttttcccggcggtaagcagtttttgcagcttttgctggctttgcgctttcgtgaaggtgggggtaaaggcgcgcagaatagcgctcatgtactccagcgctttcgctttcgccgctttctgctctggcccctgaatcggcaaccaggtgatctgcatacttttgatttttaacgttccgcgctcaagggcggtagaggcatacagattctcgttaattttgctggccgcgcgggtcagggtcggcgtatcgcgggcgctgtcaatcgcacggaactctcccagcggaagtgaggggttttctttgttgaaggcttcgcggaactggctgatagattgatcgaaagagggggcgcccgccagaagatagggggcggtgaccggggaagccgtttccgcggcatagagggaaaaactggcgctcagcatcgctaaacacaaataaagagagtgtgccgaacttttcatcaacattgcccctggccatcattgcccatgattaaaacgatatcttgtcggcttgtcaaaaggtcacaactccagggtaaaatgcgggctaaacaataataaggaaccttacatgaccatacagcagtggctgttttcattcaaagggcgtattggacgccgtgacttctggatctggattgcaacgtgggttgtcgccatgctgcttctgttttttgttgcctacaacgcatggctgagcacgcaaacggcggcatttgcgctggtctgtttactgtggccaaccgccgccgtagtggtgaaacgtctgcacgatcgtggccgctccggcgcatgggctttcctgattattctggcgtggatgctggtggcggggaactggtcaatgctgccctcaatcctcccatgggtggtgggcagactgctgccgacggttatctttgtaatgatggttgtcgaactgggcgcgtttatcggcacccagagcgagaacaaatatggaaaagatacccttgaggtgaagtaccgctgatcaccagtagtgttcggcggtcatgtggcccggccggcggcgaaggtgcttcgtcatctgccgggtatccttcagcaactgctgcgtatcgcgtaccatctgcgggttaccgcacagcatcacatggctggtttcggtattcatcggtaaacccaccgcttcttccagcgcgccgctttcaatcaacgccggaacgcgaccggttaacgagccggctgcggtttcgcggctgaccaccgtctgaatttttaacttcccgccatatcgctgttccagcgcctgcatctgcggcaaatagctcaggtctgcggcgtagcgcgcggcgtgaaccagcacgatatttttaaagcgctccagatctttgccgtattgcagaatggaaagatacgggccgatggccgtgccggtcgccagcatccagagcgtgtcacagtcggggatttcatccagcacgaagaaccccgccgcgtcggagacaatctgcacttcatcgcccggcttcagcgcggcgaggcgtgggctgagcttaccgtccgggacggtgaccagatagaactcaaggtccgggttatcaggcgcattaacgtaagagtaggcgcgctgtacgcgttcaccgtcgatatccaacccgagcttggcaaactgcccggcagtaaacggatgaacgggagcgtgcagcgtgaggctaaatagcgcatcggtccagaactgtacctttgtgactttacctgttacccagtccgccatgatcttctcctgtgctgtttctctcttctatcttccgtacttgcgggaaacatttccagcccattcgggccggaaagctctatcgatcaaacggttttacagaatgtgcgtctgtacgtccggatctttacgatcgagataatgaatggacttaatgcgacgaatggtgcgggatttaccgcggatcagcagggtttcagtggtggccatgttgcccttgcgggtgatgccgtccagcagatcgcctttggtgatgccggttgcggagaagaccacgttatcgctgcgggccatctcgttcagcgcgagcactttattggcctcgatgcccatcgccgcgcagcgcgccagttcgtctgcaccaatgcgaaggttctcgtcgctgtcgcctttgacctcatggcgtggcagcagacgcgcctgcatatcgccgtccagcgcgcggatcactgccgcagagaccacaccctccggcgcgccgccgatgccgtaaagcacgtcgacttcgctgtccggcatgcaggtcagaatagaggcggcaacgtcgccatccggaatagcaaacacgcgtacgccgagcgcttgcaggtacgcgatggtggcgtcgtggcgcggtttcgccagaatggtcacggtgagttcgctgagcgctttacccagcgccgcggcgatattgcgcaggttggcgtccagcggcaggctaaggtcgatagcgcctttagcgccaggaccgacgatcagtttttccatgtacatatcgggcgcgttgaggaagcagcccttatcgcccaccgccagtaccgccagcgcgttggcctggcccatcgccgtcatacgcgtgccttcaatcgggtcgaccgcgatatccacggcatcgcctttgcccgtcccgactttttcaccgatgtagagcatcggcgcttcgtcgatttcgccttcgccaatgacgatagtgccatcgatattgacctgattaagcacaatgcgcatggcgtggacggctgcaccgtctgcggtatttttgtcgccacggcccagccacttgtagcctgcgagggcggcagcttcggtgacgcgggaaaactcgatagcaagttcacgtttcatgaggtactcgtacaatcaaaaggaattgcacgaagtttatcacagagtggggaggggcgaagggaccggtgcggtcggagcccctcaccctaaccctctcccaggggagagggaatataggtttactcgtcgtgctcttcccacgccagggcacgtttcaccgctttcttccagccgctatagcggtagttgcgctcggtggtttcgatgccaggacggaattcgcgttcgataaccgctttttcctgaagctcgtcgaggttttgccagaagccaaccgccagacctgccagatacgccgcgcccagcgccgtcacttctcgcacctcaggacgttcaacgcgggtgcccagaatgtcggactggaactgcatcaggaagttgttggctaccgcaccgccgtccacgcgcagggcgtgcagacgaatgccggagtcagcctgcatcgcttccagcacgtcgcgcgtctggtaggcgatggattccagcgtcgcgcgaatgatgtggtttgagttcacgccgcgcgtcaggccgaaaatcgcgccgcgggcatacggatcccagtacggtgcgcccagaccggtgaacgctggcaccacgtacacgccgttggtgtctttcactttggtcgcgaagtattcggagtcaaacgcatcgctgatcagcttcatctcgtcgcgcagccactgaatggaggcacccgccatgaataccgcgccttccagggcatagttcacttcgccgcgcgggccgcaggcgatggtggtcagcagaccgttttctgatttcaccgctttctcgccggtgttcatcagcataaaacaaccggtgccgtaggtgttcttcgccatcccttccttgacgcacagctggccgaacagggccgcctgctggtcaccggcgataccggcgataggaatacgggtgccacctttaccgccaatgttggtctggccatacacttctgaagacttacggacttctggcagcatcgcgcgcggaatgtccagcgcgtccagcatcttgtcatcccactcaagggtgttgatgttgaacagcatggtgcgcgaggcgttggtgtagtcggtaacgtgaacgcgtccctgagtcatcttccagataagccaggtatcgacggtgccgaacagtagctcgccacgtcgtgcgcgctcgcgtgaaccttccacgtggtcgaggatccacttcactttggtgccggagaaataggggtcaaccaccaggccggtggcgctgcgcacgtactcttccattccttcgcgcttcagctgttcgcagatctctgacgtacgacggcactgccagacaatggcgttgtagatgggcttaccggtttctcgctcccagaccacagtcgtttcacgctggttggtgataccgatagcggcaatctggtcagaactgatgtcggctttcgccagcacttccaccagcgtggagctttgcgacgcccagatctccatcgggtcgtgttctacccagcctggacgcggataaatttgctcaaattcgcgttgagacacgctgacaatgttcgcgtcatgatccattacgacagcgcgggagctggtggtgccctggtcgagcgcaacgatatattttttttcggtcatggtatgtgtcccgtagtcagattacagcgaagctttttgttgtgtggtggaagccgtctctttctcctcttccacacaggtgtcgcacggtaagtggcgaccaattaatttgcgatagccgaatgcgcccagcgccgcccctacgattggcccgaacagcggaaccaggaagtaaggaatgtctttgccgcccgtgaaggcgacatcgccccatcccgcaaagaaggcgaaggtttttggacccaggtcacgcgccggattcatcgcaaagccggtcagcggacccatggatgcgccaattaccgcaatcagaaggccaatcaaaagtggcgccagcgggccgcgcggaatgccgtttccatcgtcgcccagcgccatgatgacgcccatcagaatagcggtaatcaccatctcaaccgcgaacgcctgcacaaaattgatatgcggattcggatacgttgagaaaatgcctgccagatccagactttcgacactgccacgcaccatatgatgcgtctgttcgaagtcgatgaaaagattgtaataaagcccgtaaactaacgccgctgcgcaaaaggcgccggcaaattgcgaaatgataaaaggaacaactttgcgtccgtcaaaacacgcgaatagccacaacgcgatggtcaccgccgggttaagatgtgcaccggaaacccctgcggtcaggtagatggccatcgccacgcccagaccccagataatactgatttcccactgaccaaaactggcacccgccactttcagtgctgcgacacagcctactccgaagaatatcaacaacccggtacccaggaactcggcaatacactggccttttaaggttgatgtctgactcataatcggaatcctgcaaaagagtaatgtttattgtttgcgtgaccgcccgtgacagtcacgatgccctgtagacatagtgttaatttatcgttaacgagcacaaacgagaaatatcgaaatctaaatgtgtggtctgcgtcaataaaatgagcgttttcgcgccataaagcgcgtttttgcatcagataatgattatgggctgaatcatttctttaacttatgggttaacaacttaggggtatatgcggcgaacgcaccaggacgaggccgaaaagtgttgcaaaccgcgatctgcgtggcatgccgctggacaggggcgacggcgctccatacaatcggaacatatgttgtgcgcgtttacgttaaagcgtcgccttgcaattcaggagaggtaggatcatgtctttagaagtgtttgagaaactggaatcgaaagtacagcaggcgattgacaccatcacgctgctgcaaatggaaattgaagagctgaaagagaagaacaactccctgtcacaggaagttcagaatgnnnnnnnnnnnnnnnnnnnnnnnnnnnnnnnnnnnnnnnnnnnnnnnnnnnnnnnnnnnnnnnnnnnnnnnnnnnnnnnnnnnnnnnnnnnnnnnnnnnnnnnnnnnnnnnnnnnnnnnnnnnnnnnnnnnnnnnnnnnnnnnnnnnnnnnnnnnnnnnnnnnnnnnnnnnnnnnnnnnnncacagccgtgaagaactggagcgcgaaaacaaccagctgcgcgaacagcagaacggctggcaggaacgcttgcaggcgctgctgggacgtatggaagaagtttgatttccttagggaatgcattgaacaggccgggtaaggcgaagccgccacccggcttttttatggtttccgctaaccgatatcaaaccataaaaaaggccgccctgggcggccttaacgctacttgtcctgcgctgtcgtagcaaaagcaacaaacccaacaggttcatcgctctttacaacgagtacgctggcgacaatgaacgcgatacataaatagcgtttcattatgcggtccctgctgcttaccgctccaccgttcaccatcggtgataagtcggtggacacaagcccggttaaaggttgctttacggttgtgaatacaccttcccctggaccgatgcccatttgcgagatggcggaaagggacacagcatcataatgagcaacagctgcggagttaaggtttccacacataattaggaatttataaagggtcgacaggggttacctgaggaatgaaccagggtaagataaaaatcctggttaaaggttgcaatatcacccaacggaccgcgaatcccgagggacaaaaaaaccgccacattgctgttggcggtttttttatgcatctcgcttaccgattaactactcaatatccagcgcatcctcagaaaggataatgccggtattgtcagcataaaggtggtcacccgagaagaaagtcacgccgccgaaattgacgcgcacgtcgctttcgccgatgccgtcgcccgctgcgcctaccggtatggccgcgatggcctgaatcccgatatccaggtcttcgagatcgtccacctgacgcacggaaccgtacaccacaatgccttcccactcgttctggacggcaattcccgccagttcagcatcaatcaatgcacggcgcacggaaccgccgccgtcgaccaccagaacgcggccacggccgttctcttcgagcagatcgtacagcaacccgttgtcctcgaaacatttcaccgtgatgatttgtccgccaaacgacgaccgtccaccaaagttggagaacaggggttcaacgacgttgacatcttcctggtagatgtcacaaagctcggaggtatcgtatttcataggtttaacgctctgttgctgcgaatgtgttcagtatatcgtgcgaaatgcgttgttggcaaaatcatcaattgttaattgatatttgtcagctaactcagcgtctggcttaagacaatcccgatgacgaacagcaggttagtcaacagcgcgccttttaccgtacgttccagcatcggtggcatggcggccgggctgagttcacgcataacgtagcgggcctgcttaatcagcagcggtgcggcgagcacaaacagccagccccagaggctgtgcagcgaaatcagattgaacagcgccaggcagaccagcgcgccgatgagcaggcaggcgtgatagcggcgtgcattcaccggacccagacgcacggccagcgtgtttttaccgttctcgcggtcgctatcgatgtcgcgcagattattgatattcagcaccgccgtcgccagcagaccacaggcggtcgccggcaggaacagggcagggatcaccgtgtgcgcctgtaagtaccagcttcccatcacgctcagccagccgaagaacaccagcacggagatgtcgcccagaccaatatacccgtaaggacgcgtcccgacggtataggtaatggctgcaataatggcgagcaagcccagcaccaggaagccaatgaaatcactggtggttttcgaggcgaccgtcaccagcgccagcccggacaggcaaatcaacaccacggtgataatcagcgcccgcttcatctgtgcctgggtaatcacccctttttgcatgccgcgcagcggcccgatgcggtcaggcttgtcgctgccttttaccgcatcgccgtaatcattggcgagattagagaggatttgcagcagcccggcggtgacaagcgccagacctgctaccagcggatcgaaatgaccctgccaccaggcaagcgtggtaccgacgataatggcggcaaaagccagaggaagcgttttaggacgcagactttcgagccacgcctgtgtacggctgatatcagtcatagttatttagccaataaaaatgggggccatagcccccatcaacagtgatgaaaatgcattgaacgcgattatagaataaaacggctcagatcttcatctgccactaacgcatccaggtgtttgcccacatagtctgcgtcaatggtaatgctttgaccgttaaggtcgctcgcatcataagagatgtcttccatcaggcgttccagcacggtgtgcagacgacgcgcaccgatgttttcggtggtttcgttgacctgccacgcggcctgggcgatgcgcttgataccgtcatcggtaaattcaatgttcacgccttcggtcgccatcagcgctttgtactgtacggtcacagaagcgtttggctcagtcaggatacgttcgaaatcttcggtggtcagcgcctgtaactcgacgcggattggcagacgtccctgaagttccgggatcaggtcagacgggctggcaatctggaacgcaccggaggcgataaacagaatgtggtcagttttaaccatgccgtgcttggtggagacggtgcaaccttccaccagcggcagcaggtcgcgctgaacgccttcgcgtgagacatccgggccggacgcgttgccgcgcttacagatcttgtcgatttcgtcgataaacacgataccgtgctgctcaaccgcgtcgatagcatcctgtttcagctcttccgggttaaccagcttcgcggcttcttcttcaatcagcagcttcatcgcgtctttgattttcagcttacgcgctttctgcttctgcccgcccaggttctggaacatggactgcaactggctggtcatctcttccatgcccggaggtgccataatttccacgcccattggcgcggcagcgagatcgatctcaatctctttgtcgtccagctcgccttcgcgcagttttttgcggaatgcctgacgcgcagcagaaggttcaggctgctgttcagcctgtccccagttgttttttgccggtgggatcagcacgtcgagaatacgctcttcggccatctcttcggcgcgatagcggtttttctcaattgcctggacacgcaccatcttaatcgccgagtcggtcaggtcgcggatgatggagtccacttctttacccacatagcccacttcggtgaacttggtggcttcaactttgatgaacggcgcgttagccagtttggccagacgacgggcgatttcggttttacccacaccggtcgggccgatcatcagaatatttttgggtgtcacttcgtggcgaagctcttcgtcgagctgcatgcgacgccagcggttacgcagtgcgatagccacggagcgcttggcgtcgtcctggccgataatgtgcttgttcagttcgctgacaatttcgcgtggggtcatttcagacatgggcgatccttacgctttagacggtaattcttcgatggtgtgattgtggttggtatagatgcagatatcacctgcaatatccaacgctttcaccgcgatatcgcgcgcgttcatgtcggtattttccaacagcgcacgggctgcggcctgggcgtacgggccgccagagccgatggcaatcaggtcgttttcaggctgaaccacgtcgccgttaccggtgatgatcagcgaggcgttttcgtcagccacggccagcagcgcttcgagcttgcgcagcatgcggtcggtacgccagtcttttgccagctcaacggcggctttcaccagatgaccctgatgcatttccagtttgcgttcaaacagttcaaacagcgtgaaggcatcagccgtgccgcctgcgaaaccggcgatcactttgtcgttataaagacgacgtactttcttcacgttgcctttcatgacggtattacccagcgtggcctggccatcaccggcaattaccacctggccgttacggcgtacacttactattgttgtcacgagcagaccccctggttacagattcgggaaacagaagccctgagcctgtgctcagggctgaattaaatgatagatgggggggattttgggggtttcaacccccggaggcgagtcgaatgcagtttgtgtggccagccactttcaaacgggaaatggtgccgtctgcgttttctttgcctttgaccggtccaatcactacgcgattccagccgttgttggtggtaatgcgagagtcaaatccttcaaatgccagctgagcacgcaccgtttctgcctgttcggcgcctttaaacgaaccgcactgaaccatccagcggcgttcatcttttttctcagccgtctgcttcggtgcctcggtctctttggtgaccggcgcagcctgctgcgtttttggctgttgcgcagtggtatgcgcaggcgtctgcaacagatcctgatacggctgtgccgtttgcttctgcggctgcgccttcggttgctgctggacaggctgagtttgtacggtacgcgtctgctgctgcggttgtgaacgcggctgctgtaccggctgcgtctgcgtccactgctgctgttgcgtttgctgctgagcctgacgctggcgctgcaacgtttgctgacgctgcgccggggtttgttcgttccacggtacttcgttcagctgcgtaggctgctggcgcatgtccgcctgcatctgagcgagcaattgacgctgttcgtccgtcagctgatcggcattctttacttcacccccggcagaaggctcggtaggcgcacgtacgccaggctggcggctttccagctctttaatgtagcgccagcgctcttcaggcttcggcggcaggccgttgccaacgaccttgttaccctgaagggcttcagactcttcttttttatgatgcgtaatgaagtagaggccgccaataaaggccaccagcacagccgcagcaatggcgaccatagctggggagacagcagacaggctgcgttgcttgctttttgaactactctttttgcgtcgcgaaggtgccggctggccgcgacgtacataatctcgttgtgccactatcgtttcgctgtatttattcgttcgtcagcccgccatgttacttaagcgacggggctttgaccagataagggtgtcgaaaggtatttactttaagttaatgcctgggtagagccgcgcacaatcagctcacaatccagtagtcgtgacccactgctaactgattgaccgtgcagctgatccagcaaaagcagcatcgcttcacggccgatgtcataccgcggctgtgcaacggtcgaaagcggcggatcgacaaaactccgaaagtgaaatattatcaaaaccgattatcgacaggtcctgcggcacgcgcaggccgtgacgtttggcgtaggataacgcccccagcgccatcacgtcgctgtggcagaagaccgcggtgggcggttctggcaaggacagcaatttttccagcgcctgcccgcccgcttcaaaggtgaaatcaccgcgcgcaatgtagtgcggatcgacgatagccccggtacggcgcagcgcctgaacgtagccctgcaagcggtaatgacacagcggcatctcttctggtccggcgatacagccgatacgcttatgccccagttcctgaagatagttcacggcgttgaatgcggcggtgaggttatcgatatgaacggttggcagctccagctccggcgcgaattcgttcgccatgaccatcggcggtaaattgcgctgttcttcaatgctggcatcaaacggcaggcgtgagccaagcagcagcatgccatcaatctgcttggtgatgatcaggtcgatgaacgttttttcctgctggttctggtgagcacaatcgccaatcagcaccagatagccttgggcggcggccgtgacctcaatgccgcggatgatttcgctgaagaagggatcgcagatatccggcacgatcaccaggatggtgcgggattcgttgcgtttaacgttgcgccccatggcttgcgggaaataaccgacctcaagcgccgccttttcaacccggtttcgggtcgcctgggagactttgtcagggttcatcaatgcgcgggacacggttgctgttgagacttgtgctttctcggcaacgtctttcatggtcgccgaggcaacctctttcctggacttcaacgtcttctcctcgcctgaacaccgaactgcggacagcaccatttttacagatagttaatggaatcggttacagaattttcataaaaagtgtgaggcgcattaaatttttcgatccgtcttcagccttcaatcggatcgacgtcaagaacccacttcacttttcgcgcttccggtagggtattgatcagcgccagcgtgccgctgacgatctgctgtaaacggatacgcgaggggtgctgaagtaacagttgccagcggaaacggccgccgcgtttcggggcgagcgcgggtaccgggcctaaaatccacagctgattatccaccagcgggctggcttgcaggaggtttctcagctgttgcaggaacagcggagcctgctggttattatgatcttccgcacggatgataacgtggctggtccatgggggaagctgcatcgtctgacgttcggccagcgcctggtccgcgaaggcgtcatagcctttgtgcagcagagtttgcagcagcggatgttcagggtggtgcgtttgcagcaccacctcgccctgcttacccgctcgaccagcgcgaccggcaacctgggtataaagctgggcgaaacgctcggcggagcgaaaatccgcggagaacagcgcgccgtcgacgtccagcagggcgaccagcgtcacgtccgggaagtggtgccctttcgccagcatctgagtaccaatcaggatgcgcgcgccgccgcgatgcacttccgccagttgctgctccagcgcccctttacggctggtggtatccctgtcgatacgggagatgggtacgtccgggaagaagggcgcgagcgcctgttcaagctgttccgttcccagaccgaccggcacgatgtgcgttgagccgcaggacgggcattgacgggggaccggacgctggctgtcgcagtggtggcagcgtaaatggcgctgagcctggtggaaggtgtagtagtgatcgcagcgcgggcactccgcgatccagccgcagtcgtggcacagcagcgcaggcgcgaagccgcggcggttcaggaacaggatcacctggttgcccgcctgcaaatgctggcgcatgcggctaatcagcgcaggcgctaacccggcctgcacctgctggcctttcaaatccagcacatgctgaatggccgggcgggcattccccgcacggcgcgtcaggcgcagcatgtggtatttacgctggcgaacgttgtgcagcgtttcaagcgcgggggtggcggacccgagaataatggggatttgctcgctgtgggcgcggtacacggctaagtcgcgggcgtgatagcgccagccttcctgctgtttataggagctgtcatgctcttcatcgattacgataacgccgagatttttaaagggcgtaaacagcgatgaacgggtgccgatcacaattgctgcttcgccgtttttcgctttcagccaggcgctgaggcgctcgctgtcgttcaggccggagtgcagaacctcaacgggcgcattaaagcgttcacggaaacgcgcgatggtttgcggcgtcaggccgatttccggcaccatcaccagcgcctgtttgccctgcgcgagcacgttttccagcacgctcagatatacttcggttttaccggagccggtgacgcccgccagcagccaggcggaaaaacgatcggcggcgctgtgaatcgcgcccacggcggtggcctgctcggtattcagacgcaggcgatcgcccgagacggaaaagccgtcgcgccagtcgtgaagggcaggtgcttcactggccagctcgctcagccctttcttccttaatgcctgcaacgcggtttcgcttacctcaagctcgtcgacctgatggcgccagatttttccctggcgcagcgcggccagcgcctgctgctgtttctgcgagcgcttcaggctgttaatgtccaccgcctggccctgctcggtggcaaaccagtaccacattggcgcgtggctggcgctcttgccctggcgcagcataatgggcagggcatggaacagcacgtcgccaatcggatgatgataataatctgccgcccacagcagcagtcgccaggtgctggtggagtaaaccggctcgctgtccagcacctcaacaaccgatttcagctcgttaagcggcagttcgctgtgttcgctgacggacaccacgatccccacgcgctgctgtttgccaaacggcacggtcacgcgacagcccgctttggcgctcatgctgtcgggcagcaggtagtcaaaggtgcggggaagcggaacgggcagggcaacgtgagcgacgggcatcgaatcttcctgacttgaaaagtggcgcgttagtatacacattagtgaaagcggcgtgcggatcagtttgcatacgttggtcaaattctgtatgattcgccgcctttggtgtattttacgccaaagaacttacattcaacatcgcgtggtgtctggcgttagggctggaagagcgacgcggccttaactgaggttctcccatgaaaaaagatattcacccgaaatacgaaatgattactgcaaactgctcttgcggtaactctatccagatccgctctaccgtgggtcacgatctgaacctggacgtgtgcggcaaatgccacccgttctacactggtaagcagcgtgatgttgcaaccggtggccgtgttgaccgcttcaacaagcgtttcagcatcccgggcgctaaataagtttcccgaaaaaaaggcaccgcaaggtgccttttttgtatccgcttatcagtattcccacgtatccgggtcgatacccagttcacgcatgatcaccttcgcctcttctggaatttcgtcactgcgctctttgcgcagatcgtcatcgttcggcaacggttggccggtaaacgcatgcaggaacgcttcgcacagcagttcgctgttggtggcgtgacgcaggttgttcacctgacgacgcgtacgttcatcggtgaggatcttcaacaccttcagaggaatggacaccgtgattttcttgacttgctcactcttcttaccgtgctcagcgtatgggctgatatattcgccgctccattcagccatgagatacctttaatcctctcagtcattaatctaaaggtgcaaaaccggtaaccatcagttttgaaccgtaatcttgcgtagtttaccgtagagacgataccgaggcacggatattgccgctgtagcgtgtcctaaagcatataattttaacggctatttgcacattgctcaatctatacgcaaagaagtttagatgtccagatgtattgacgtccatactttcaatgtttactctggtgcctgacttttcacctcattcgccaggaagcctcaccatgacgcgtaaacaggccaccatcgcagtgcgtagcggattgaatgatgacgagcagtacggctgcgttgtcccgccaattcatctctccagcacctataatttcaccggatttaatgaaccccgcgcgcatgactactcgcgtcgcggcaatcctacgcgtgacgtcacgcagcgcgcgctggcggaactggaaggcggcgcgggtgcggtattaaccaataccggcatgtctgccattcacctggtgactacggtgttcctgaaacctggcgatctgctggtggcgccgcacgactgttatggcggcagctatcgtctgtttgatagcctggcgaaacgtggctgctaccgtgtgctgtttgtcgatcaaaacgacgaacaggcgctgaaacaggcgcttgccgagcagccgaagctggtgctggtggaaagtccaagcaatccattgttgcgcgtagtcgatattgcgaaaatttgtcagctcgcaagggatgcgggagcgataagtgtagtggataatacgttcctcagtccggcccttcagaacccactggcactgggtgccgatctggtgttgcattcatgcactaaatatctgaacggccattctgacgtagtagcaggtgtggtgattgccaaagatcctgaggtagtcaccgaactggcatggtgggccaataacattggcgtcaccgcgggcgcgttcgacagctatttgctgttgcgcggcatccgtacgctgtcgccgcgtatggacgtggcgcagcgtaatgcccaggcgatcgtggatttcctgaaaacccagccgctggtgaagaagctttatcacccgtcgctgccggaaaatcaggggcacgagattgccgcgcgccaacagaaaggatttggcgcgatgttaagttttgaactggacggtgacgagcaaacgctgcgtcgcttcctgagcgggttgtcattgtttacgctggcggaatccttagggggagtagaaagcttgatctcccacgccgcaaccatgacgcacgcaggtatggcacccgaagcacgtgccgccgccgggatttccgagacgctgctgcgtatctcgaccggtattgaagattctgaagatttaattgccgatctggaaaatggcttccgggttgcagccaaggggtaatcatgagtgtgatagcgcaggcagggacgaagggtcgtcagctgcacaagtttggtggtagtagtcttgctgatgtgaaatgttacctgcgtgtcgcagggatcatgaccgagtattcacagccgggggacatgatggttgtctctgcggcgggcagcaccaccaaccagttgattagctggctgaaactgagccagaccgatcgcctctctgcgcatcaggtgcaacagtccttacgtcgttaccagagtgaactgattgccggtttgctgcctgcggacgtggcggacgggctgattagcgcttttacgcacgaccttgagcgtctggccgctctgctggacagcggcattaccgatgcagtgtatgcggaagtggttggccacggtgaagtgtggtctgcgcgcctgatggccgccgtgctgcaacatcttggtgtggaagccgcctggctcgacgcgcgtgatttcctgcgtgccgaacgtgccgcacagccgcaggtggacgaagggttgtcttacccgctgctgcaacagctgctggtgcaacatcctggtaaacgtattgtcgtcaccggttttatcagccgcagcaatgctggcgaaaccgttctgctgggccgcaacggctctgactactcggcaacgcagattggcgccctggcgggcgtgtcccgcgtcaccatctggagcgacgtggccggtgtctacagcgcggacccgcgcaaagtaaaagatgcctgcctgctgccgctgctgcgtctcgacgaagcgagcgaactggcgcgtctggcggccccggtgctgcacgcgcgcacgctacagccggtttccggcagcgatatcgacctgcaactacgctgtagctacacgccggatcagggttccacccgcattgaacgcgtgctggcatccggtacgggcgcgcgcattgtcaccagccatgatgacatctgcctgattgagttccaggtgcctgcgggccaggatttcaaactggcacacaaagatatcgacaccatcctgaaacgtgcccaggtgcgtccgctggccgttggcgtacataacgatcgtcagctgttgcagttctgctataccgctgaagtggtggacagcgccctgaaaattctggatgaagcgggcctgccgggcgagcttcgcctgcgtcaggggctggcgctggtggcgatggtgggcgcgggcgtcacccgtaacccgctccactgccaccgcttctggcagcaactgaaaggtcagccggtggagttcacctggcagtcggaagagggcatcagtctggttgccgtgctgcgtaaagggccaaccgaaagcctgattcagggtctgcacacctccctgttccgcgcggaaaaacgcatcggcctggtactgttcgggaaagggaacatcggttcccgctggctggagctgttcgcccgcgagcaggtaacgctttcggcgcgtaccgggtttgaatttattctggcaggggtagtggacagccgccgcagcctgctgaactacgaagggctggacgccagccgggcgctggccttctttaacgatgaagcggttgagcaggatgaagagtcgctgttcctgtggatgcgcgcgcacccgtacgacgatctggtggtgctggatgtgaccgccagcgaacagctggccgatcagtatctggatttcgccagccacggtttccacgtcatcagcgccaacaaactggcgggcgcgagcagcactgataaataccgtcagatccatgacgcattcgaaaaaacgggccgtcactggctgtataacgccaccgttggcgcgggcctgccagtgaaccataccgtgcgcgacctgattgaaagcggcgacagcattctggcgctgagcgggatcttctccggcacgctctcctggctgtttttgcagtttgatggcaccgttccgttcaccgacctggtggatcaggcgtggcagcagggcttaaccgagccggatccccgcgttgaccttgccggtaaagatgtgatgcgtaagctggtgatcctggcgcgtgaagccggctacgacattgagccgggtcaggtacgcgttgagtcgctggtgcctgcgggctgcgaggaagggtccgtcgatcacttcttcgagaacggcgacgagctgaacgagcagatggtgcaacgtctggaagcggctaacgagatgggcctggtgctgcgttacgtggcgcgcttcgaggcgaacggtaaagcgcgcgtgggcgtggaggcggtgcgtcctgaacatccgctggcggcgctcctgccgtgcgataacgtcttcgccatcgaaagccgctggtatcgcgataacccgctggtgatccgtggcccgggcgcgggacgcgatgtcaccgccggagccattcagtctgacattaatcgtctggctaagctgctgtaatttcgcttgttccctctccccgtgggagagggttagggtgagggcagcagaccgcactcacccccatcatgaacgcccttcatcttgcctgaacaaacctcaccgttattgttgattatttctgttgacgtcatcccgcttttccgtcatttttacatctggacgtctaaacgtatagaagttcacaacacaacaaacatcgacacgcgaaagatagaggtaaggtatgagcttttttcacgccaaccagcgggaagcactgaatcagagcctggccgaagtaaacggccagattaacgtctcttttgaatttttcccgccgcgcaccagtgaaatggagcaaaccctgtggagctctatcgatcgcctgagcagcctgaagccgaagttcgtctccgtgacctacggcgccaactccggtgagcgtgaccgcacgcacagcatcattaagggcattaaagaccgaaccggtctggaagcggcgccgcacctgacctgtatcgacgccacccgtgatgaactgcgcgccattgcccaggactactggaataacggcattcgccacattgtggccctgcgcggcgacctcccgccaggcagcggcaagccggagatgtttgccgccgatctggtcgggctgctgaaagacgttgccgactttgatatctccgtggccgcctaccctgaagttcacccggaagccaaaagcgcccaggcggatctgctcaacctcaagcgtaaagtggaggccggtgctaaccgcgcgattacgcagtttttctttgacgtggaaagctacctgcgctttcgcgaccgctgcgtctcggcgggtattgatgtcgaaatcatccctggcattctgccggtctcgaacttcaaacaggcgaagaaattcgcggatatgaccaacgtgcgcattccgctgtggatgtccaaaatgtacgaaggactggacgacgacccggaaacccgcaagctggtgggggccaatatcgcgatggatatggtgaagattttaagtcgcgaaggggtgaaagatttccatttctacaccctgaaccgcgcggaaatgagctatgccatttgccatacgctcggtgttcgcccggcgctgtaaagtaaaaagccctcataaaacgagggctttttaatcgaacagagagttaaaaggtattagctatcgaatctgtggattaattcaactatctcttatcgctagtggtgtatatcgtaacggtaacactgtaaagggagcatagcgatgagcacgtcagacgagaccaataacgcggcatccgccggcaaatgtccgttccaccagggcggcgtcgatcacagcgcgggtgcaggtaccggcagcaaagagtggtggcctaaacaacttcgcatcgatcttctaaaccaacattccaaccgttcgaacccgctgggtgaagacttcgactaccgcaaagaattcagcaagctcgactattctgcccttaagggcgatctcaaagccctgttaaccgactcacaaccgtggtggcctgccgactggggcagctatgcgggcctgtttatccgtatggcctggcacggcgcgggtacctatcgctccgttgacggtcgcggcggcgccggacgcggtcagcaacgctttgcaccgctgaactcctggccggataacgtcagcctggataaggctcgccgcctgctgtggccaattaagcaaaaatacggacaaaaaatctcctgggctgacctctttatcctcgcgggtaacgtggcgctggagaactccggcttccgcacctttggtttcggtgccgggcgtgaagacgtctgggaaccggatctggacgtgaactggggcgatgaaaaagcctggctgacccaccgtgacccggaagcgctggcgaagcgcccgctggcggccaccgaaatgggtctgatttatgtgaacccggaagggccgaacgccagcggtgaaccgctgtctgcggcggcggcgatccgcgctacctttggcaacatgggcatgaatgacgaagagaccgtcgcgctgattgcgggcggccatacgctcggtaaaacgcacggcgcaggtgaagccacgcacgtgggcactgacccggaagcgtcgccgattgaagcgcagggcctgggctgggccagcacgcacggcaccggtattggcgctgacgccatcacctccgggctggaagttatctggtctcaaaccccgacccagtggagcaattacttcttcgagaacctgttcaaatacgaatgggtgcagacgcgtagcccggcgggcgccattcagttcgaagccgtggatgcgccggaaattatgcctgacccgttcgacccgtcgaaaaaacgcaagccaaccatgctggtcaccgatctgacgctgcgttttgatccggaattcgagaaaatttcccgtcgcttcctgaacgatccgcaggccttcaacgaagcctttgcgcgtgcctggttcaagctgacccaccgcgatatggggccaaaagcgcggtacatcggcccggaagtaccgaaagaagatctgatttggcaggatccgctgccgcaggcggtgttcaatccgtcgaaagaagacattgaaagcctgaaagcggaaattgtggcatccggtctgtccgtgagcgaactggtttcggttgcctgggcgtcggcttcaaccttccgaggtggcgataagcgcggcggtgccaacggcgcgcgtctggcactggcgcctcagcgcgactgggatgtgaacgccgcagcggttcgcgcgttaccggctctggaagccatccagcgcaccactaataaagcctcactggccgatatcatcgtgctggcgggtgttgtgggcgttgagcaggcggcgaaagccgcgggcgtttacgtcaacgtaccgttcaccccgggccgcgtggatgcgcgtcaggaccagacggacatcgagatgtttaacctgctcgaaccggttgctgacggtttccgcaactaccgtgcgcaggtggatgtgtccactacggagtcgctgctgatcgacaaagcccagcagctgaccctgactgcgccggaactgacggtgctgatcggcggtctgcgcgtactgggtgcaaacttcgatggcagcaagaatggcgtgtttaccaaccgcgagggcgtgctgagcaacgacttcttcgttaatctgctggatatgaacacccagtggaaagcgaccgacgactcaaacgagctgtttgccggtagcgatcgcgccagcggggaagtgaaatacaccgcgacccgcgccgatctggtcttcggttcaaacgccgtcctgcgtgcgctggccgaagtttacgccagcagtgatgcacacgagaagttcgttcgtgattttgttgccgcatgggcgcgagtgatggatttggaccggtttgatgtgaagtaaccattgtgccgggtggcggctacgccttacccggcctacaaattaaagtgccatgtaggccgggtaagcgcagcgccacccggcttttttcgttactcccactcctgcaagaatcgctgtccgtactggtccgccaccagcagtgccgcatagacctgatccggcgttacgccgccaggcatgttgtgaatggtttccccttcggcacaggacgcctccgcgatcagccgcattttggccggaatatcctctttgatattcagctgcgccagcgtgatcggcagtccaacactgtggcaaagcgcggcgacggtctcaatttcttcaaccggcgcgttctccagtaccagttgcgtcagcgtgccgaacgcgaccttttcaccatggtagaaatgatgcgcatccggcaccgccgtcatgccgttgtgaatggcatgcgccgccgccagcccgccgctttcaaagcccacgccgctgagataggtgttggcttcgataatgcgttccagcgccggtgtgaccacgtgctgttccgccgccagcatcgctttctcgccctcttcaaccagcgtgttgtagcacagctctgccagcgctaacgctgcctgcgtgcacttgccgcccgccatggtcgtcgcgccgctacgtgagcaggcacgcgcttcaaaccaggttgccagggcatcgccaatcccggcggccagcaggcgtgcaggtgcgcccgccaccactttggtatcgacaatcaccatgttcgggttgtgcggcagcatcaggtagcgatcgaactcgccgctgtcggtataaatcacggaaagggcgctgcacggcgcatcggtggaggcaatggtcggggcaatggccaccggcacgtccataaagtgggccagcgctttggcagtatccagcgtttttccgccgccgatacccagcaccgccagacagtcagtgctgtcggccagctttttcaggcgatcgatttcattttgcgaacattcgccaccaaatggtgcaatttcggcatggagtccggcttttttaaaactctggcgcagggtttcttcagcaaaacccagcacaaatttatcgcccaccaccagccagcgatttgccagcggcttcaggtagtcgccgaggcgagtgagaacatctgcgccctggatgtattttcccggggattgaatgacacggtccataacattactcccttagtgtttgaggtaaattctgtcctgttcgaactgcactaagagtgactctactcccggcgtgccggtcatttgttgcgctacgtctaagggaaacgtgattgccttaccggtggcaaagattgagggggagatcagggaagggggaagatcgagaagtgcccggcaagcgtagcgctgccgggcactgagcattaaccggtgttgcgcatacctgccgcaacgcctgctatcgttaccatcagcgcctgttcaacgcgcggatccggctctttaccttcctcctccgccagacgcgaacggtgtagcagttcagcctgtaaaacgttcagcgggtcggtgtagatgttacgcagctggatagactcggcgatccacggcaggtcttccatcaggtgggagtcattagcgatatccagcaccactttaatatcgccttcaagcagctcgcgcagctctttacccagcgcccacagctctggtttcaccagacgctgatcgtagtattccgccagccacaggtcggctttcgagaagaccatctccagcatgcccagacgggtagagaagaacggccagtcgcggcacatggtttccagttcgctctgctttccgtcttccaccactttttgcagcgccgcaccggcacccagccaggccggcagcatcagacggttttgcgtccaggcgaagatccacggaatggcgcgcagggattcaacgccgccggtcgggcgacgcttggccgggcgcgaacccagcggcagtttacccagctcctgctcaggcgtggctgagcggaagtaaggcacaaagtctttgttttcacgcacgtagccgcgatagaggtcgcaggagatgtcagacagctcgtccataatccggcaccaggactcttttggctccggcggcggcagcaggttggcttccaggatcgcactggtatagagcgacaggctgctgatggtcacttccggcaggccgtacttgaagcggatcatctcgccctgctcggtcacgcgcaggccgcctttcaggcttcctggtggttgagagagcagcgctgcgtgtgcaggcgcaccgccacgaccaatggagccgccgcgtccgtggaacagggtcagttcaataccggctttttcgcaggttttgattagcgcatcctgcgcctgatactgcgcccaggaggctgccatcacgcccgcatctttcgcggagtcggaatagccaatcatcaccatctgtttgccctgaataaagccgcgataccagtcgatgttcagcaactgggtcatcacgtcgttagcgttgttcaggtcgtcgagggtctcaaacagcggggccactggcagggcatagtcaatgcccgcttctttcagcagaaggtgaacgcccagcacgtcggacggggtcttcgccatggagatcacataggcggccaccgatcctttcggcgcatccacgatcgctttacaggtgttgagcacttcgcgggtgtcgttgcttggctcccagttgcgcggcagcagcgggcgcttggagttcagctcgcggatcaggaacgcctgtttgtcggcttctgaccagctttcatagtcgccgatgccgaggtagcgggtcagctcgcccagtgcttcggtatgacgggtactttcctgacgaacgtcgatacgcaccagcggcacgccgaaacacttcacgcggcgcagggtgtcgagcagttcgccgttggcaatgatgcccatcccacaggcctggagcgatttatagcaggcgtacagcggctcccaaagctgttcgttctggctcagcagaccttccggcttcggcaggcgctggcctttcaggcgcgcttccagccagacctgagtggccatcagctgaccgcgcagttttttcatcaggaaacggtacggttcgctggcgccttcttcaccggccagcgcgcgcagttccggcgtggcttccaccatcgacagctcggagatcagcacctgaatatctttcaggaacaggtcggtcgctttccagcggctcagcagcaggacgtggcgggtgatttccgccgtcacgttcgggttgccgtcgcggtcgccgcccatccaggaggtgaagcgcaccggaacaaaatcaaccggcaggcggtagcccaggttctcttccagctgttcgttcagctcgcgcaggtagttggggaccccttcccacaggctgttttccaccaccgcaaagccccatttggcttcgtcgaccgggcttgggcgatgcttacgaatttcatccgtgtgccaggactgggcaatcagctggcgcagacggcgcataagctggttacgttcgtagtcggcaatgtctttgttatccagttgcttcagacagttgttcacttccaccattttgtggatcagcgtacgacgggtgatttcggttgggtgtgcggtcagcaccagctccagcgaaagggattccaccgcttttttgatggtcgcttcgttgaggtcgggctggtctttgagtttacgaagggtgcgggcaatgacttccgggttgctggccgcttcgccttttggcgaaatgctgtggtattgctcagcggtgtttgccaggttcagaaactggctgaaggcgcgggcaacgggcagcagctcatcgttagagaggttctgcaaggtggtgagcagctcctgacgattggcctcgttaccggcgcgggaagatttggacagcttgcggatggtttcaacgcggtcgaggatgttctcccccagtgcgtctttgatggtatctccaagcactttgccgagcatactgacattactacgcaacgcggaatattgttcgttcataaaaacccagtcaccccatcatttttgtttatgcccatgcgaaaatcttctggacattattttgtcatctccctttataaagccacgtaaaacccccgtcgtcaattgctgcgaaaacggttcagcaaacgaataaatgtgggcaatttacgaaatttaattcgtattgcgtcagataagagatgcttatgggaatgtgacgaagatcatgcgatttgttgccctcaccctaaccctctcccacagggagaggggactgttcggtgcgtttttaatgccagcagaagtgatgcacaacctgggtaatgagttcgcgagtgggcttgatgaagcgggtttcgagatattcgtccggctggtgggcctggttgatggagccagggcccagaaccagcgtcgggcacagcgtctgaataaacggcgcttcggtgcagtagttcaccacgtcggttttctcgccgagcagtttttccaccacctgaaccagttgatggtcaggcggacattcgtagcctggaatcggcggatgcagttcggagaccgtcagacggcccggccagcgctcgctgaccggtgccagcgcttcgttcagtaagccatccagatcgctcagcgtcatgcccggcagaggacggatatccatatgcagttcgcagcaggcgcagatacggttggacgcatcaccgccgtgcaggctgccgaggtttagcgtcggatacggcacggtgaacgcctcgtagtgatagcgctctttcagatcgtcgcgcagggtcatgatgcggccaatcgcgtcatgcatcagctcgatggcgttcacgccgcgcgccggatcgctggagtggccggactgtccgagcacgcgcaccgcggtagaaatatggcctttgtgcgcccgaatcggttgcagagaggtcggttcgccgatgatcgcgcagtcaggacgaatcgatgtgttttcagagaaataacgtgcgcccgccatgctggtctcttcatcggcggtcgccagaatgtagagcggctttttcagggttgtcacgtccacgtcacgcagcgcgtcgaggataaaggcgaaaaagcctttcatgtcggcggtgcccaaaccgtagagtttgttgtcatgttcggtcagcgtgaacggatcgcgcgtccagcggccatcatcaaacggcacggtgtcagtgtggccagccagcagcaggccgcccgcgccatgtccggtactggcgagcaggttaaatttgtggcgtgttccggggacgggctgaacctcaacgttaaacccaagatcgctaaaccaacccgccagcagattgattaaagactcattgctctgatccagggcttcttccgtcgcgctgatggagggtgtggcaatcagggcgcggtaaatctcgataaatggcggtaagttcattttcattgttgacacaccttaggtcgtgatagtatcaatattcatgcaataaatgtgaataaaaatacattatcgttgagcataaaggaacccgatgttgaatacgctgattgtaggcgctagcggttatgcgggcgcagagcttgtaagctacgtaaatcgccaccctcatatgaccataaccgctttgaccgtgtcagcgcaaagcaatgatgccggaaagttaatttccgatttgcatccacagcttaagggcgtggttgatttgcctttgcagcccatgtctgacatcagcgagttcaccgacggcgttgacgttgtgtttttagccacggcgcatgaagttagccacgacctggcaccgcaatttttagcggccggctgcgtggtctttgatctctccggcgcgtttcgcgttaacgacagcgcgttctacgaaaaatattacggtttcacccatcagcacccggatctgctcgaaaaagcggtgtacggcctggcggagtggagcgctgacaaactgaaagaagcggatctgattgccgtgccgggctgctacccgacggcggcgcagctttccctgaagccgctgatcgacgccggtctgctggatctgcatcagtggccggtgatcaacgccaccagtggcgtgagcggcgccgggcgcaaagcggcgatctccaacagcttctgcgaagtgagccttcagccgtatggcgtgtttaatcaccgccatcaccctgaaatcaccacccatctgggcgcggacgtgattttcaccccgcacctcggcagcttcccgcgtgggatcctcgaaaccattacctgccgcctgaaaccgggtgtgaccaaagaacaggtgagcgaggtcttcacgcaggcgtatgcggataaaccgctggtgcgcctgtatgacaaaggcgtgccggcgttgaaaaacgtggttggcctgccgttctgcgacatcggctttgccgtgcagggcgagcatctgattgtggtcgccgcagaagataacttactcaaaggcgctgccgcacaggcaatgcagtgtgcaaatattcgtttcggcttccctgaaacgcaggctcttatttaaggtgtgatgatgaatccattaattatcaaactcggtggtgtactgctggacagcgaagaagcgctggagcgcctgtttaccgcactggtgaactatcgcgaatcacaccaacgtccgctggtgattgtgcacggcggcggctgcgtggtggatgagctgatgaaagggctcaacctgccggtgaaaaagaaaaatggcctgcgcgtgacgccagcggatcagattgacatcattaccggcgcgctggcgggaacggcgaacaaaacgctgctggcgtgggcgaagaaacaccatatcgcctccgttggcctctgtctgggcgatggagatagcgtaaaagtgacccagctcgacgaagagcttggccatgttggactggcgcagccaggttcgcctgagctgattaacaccctgctggaaggcggtttcctgccggtggtgagctcaatcggcgtgaccgaagagggcgaactgatgaacgtcaatgcggaccaggcggcgacggcgctggcggcaacgctgggcgcagacctgatcctgctctccgacgtgagcggcattctggacggcaaaggccagcgcattgcggaaatgaccgccgcaaaagccgagcagctgatcgatcagggcattatcaccgacggcatgatcgttaaagtgaacgccgcgctggatgcggcccgcacgctgggccgcccggtggatatcgcctcctggcgtcacgcggagcaactcccggcgttgtttaacggcacgccgattggcacgcgtattctggcttaagattctgtgccggatggcgcttcgcttatccggcctacgtgaattttgtaggcccggtaagcgcagcgccaccgggcaaaaatatcatcattaaggaaattcgttatggcactttggggtgggcgttttacacaggcagcggatcagcggttcaaacagttcaacgactctttgcgcttcgactaccgcctggccgaacaggatattgtcggctctgtggcctggtccaaagcgctggtgaccgttggcgtgctgaccgcagacgaacagcagcagttggaagaggcgctgaacaacctgctggaagaggtgcgtctggatccggagcaaatcctccagagcgatgccgaagatattcacagctgggtggaaggcaaactgatcgataaagtcggccagttgggtaaaaagctccataccgggcgtagccgtaatgaccaggtggcgaccgacctgaagctgtggtgcaaagagaccatcggcgaactgctggcggcgaatcgtcagttgcagagcgcactggtggacaccgcgcagagcaatcaggatgcggtgatgccgggttatacccacctgcaacgcgcgcagccggtgacgttcgcgcactggtgtctggcctacgttgagatgctggcgcgtgatgagagccgtttacaggataccttaaagcgtctggacgtcagcccgctgggcagcggcgcgctggccggtacggcgtatgaaatcgaccgtgagcagctggcaggctggctgggctttgcctccgccacccgcaacagcctggacagcgtctctgaccgtgaccacgtgctggagctgctctcgaatgcctctatcgggatggtgcacctgtcgcgctttgccgaagacctgatcttctttaactctggcgaagccgggtttgtagagctgtccgaccgcgtgacgtccggctcctccctgatgccgcagaagaaaaacccggatgcgctggagctgatccgcggtaagtgtggccgtgtgcagggcgcgctgaccggtatgatgatgaccctgaaagggctgccgctggcatacaacaaagacatgcaggaagacaaagaggggctgttcgacgcgctcgacacctggctggactgtctgcatatgggcgcgctggtgctggacggcattcaggtgaaacgtccgcgctgccaggaagcggcgcagcaggggtatgctaactctaccgagctggcggactacctggtggcgaaaggcgtaccgttccgcgaggcgcaccatattgtgggtgaagcggtggtggaagcgattcgtcagggtaaagcccttgaagagctggcgcttgccgacctgcaaaaattcagcgcggttatcggggatgatgtctacccgattctggccctgcaatcctgcctggataagcgtgcagcgaaaggtggcgtgtcgccgaagcaggtagcgcaggcgattgcggatgcgaaaaaccggttggtttgaatagtgcgggctggtgccctcaccccggccctctcccacagggagagggagaaaaacggagcctggcttagtgctgggctttttttacgcaaaaaaaagcggaccacggggtccgcaaaagttcacgttggctttagtttttcgagttttgagagaaactcgctgacggtgcggggacgtcaagggtcaaacacgtgccgcctcgtctatgtgatgtattattcaacagaatgcttgatagggataatcgttcgttgctatgctatctatcgccatgaactatcgtggcgacggaggatgaataatgaatattcgtgatcttgaatacctggtagcgttagctgagcatcgccattttcgccgcgcggcagactcctgccacgtcagccagccaacgctgagcggtcagatccgcaagctggaagatgagctgggcgtgatgctgctggagcgcaccagtcgtaaggtactgttcacgcaggcaggtcttctgctggtggatcaggcgcgcaccgtactgcgcgaggtcaaagtgctcaaggaaatggcaagccagcagggggaagcgatgtccggcccgctgcatattggcctgatcccaaccgttggcccgtacctgttgccgcaaatcattccgatgctgcaccagacgttcccgaaactcgaaatgtacctgcatgaagcgcaaacccatcagctgctggcgcagctggacagcggcaagctcgactgcgcgatcctggcgctggtcaaagagagtgaagcgtttattgaagtaccgctgttcgatgagccgatgatgctggcgatctatgaagatcacccgtgggcgaaccgcgatcgcgtgccgatggccgatctggccggtgaaaaactgctgatgctggaagatggccactgtctgcgcgatcaggcgatgggcttctgcttcgaagcgggtgccgatgaagatacccatttccgcgcaaccagcctggaaacgctgcgtaatatggtggcggcgggaagcggtattacgctgctgccggcgctggcggtgccgcacgagcgtaaacgtgatggcgtggtctatctgccgtgtattaagccggagccgcgtcgcaccattggtctggtttatcgtccggggtcaccgctgcgcagccgctatgagcagctggcagaggccatccggggtgcgatggatggccatttcgacagcgcgttaaaacaggcggtttaagccgttcagcgcagctacccgataggcttccgccatggtcgggtagttaaaggtggtgttaacgaagtactcaatggtgttgccaccacctttttgctccatgatcgcctggccgatatgaatgatttccgccgcgcgttcaccgaagcagtgaataccgaggatctctttcgtctcgcgatggaacaggatcttaagcgtacctacgctcatccccacgatttgcgcccgcgccagatgtttaaactgggcacgacccacctcgtaaggcaccttcatggccgtcagctgctgctcggttttgccgacagaactgatttccggaatggtgtagatgcccgtcgggatatcttcaatcagatgcgccgtcgcttcacctttcaccagcgcctgtgcggcgatgcggccctgatcgtacgcggcggaggccaggcttgggtaaccaatcacgtcgcccaccgcgtaaacgtgcggcagcgcagtctgatacatgctgttgaccttgagctgaccgcggctgtcggtttcaagcccgatattctccagctgcaatgaatccgtgttgccggtacggccgttggcgtacagcaggcagtccgccttcagcttcttaccagatttcaggtgcatgatcacaccgtcgtcgcagccttcgattttctcgtactcttcgttgtggcgaatcaccacgccgctgttccagaagtggtaggagagggaatctgacatctcctgatcgaggaacgccagcaggcggtcgcgggtgttgatcagatcaactttgacctccattcccctgaaaatcgacgcatattcgcagccaatcacgcccgcgccgtagatgatcacatggcgtggctcgtggtgcaggctgaggatggagtcgctgtcgtaaatgcgcgggtgcgagaaatccacgtctgccggatggtaaggacgggagccgcaggcgatcacaaatttttcagcggtgagcgtctcaaccgaaccgtcgtggcactccagcgccagggtgtgttcatccacaaaatgcgcgttcccttgcagaatttcacagtggttgcgctcatagaaaccctgacgcatgcgcgtctgctggttaatgaccgtgtctgcgtgattcaggatatcggcaaaggaggagcgaagaagtcgggagtggtcgctgtaaagagggttctggttaaattcgataatgcggctaacggcgtggcggagggctttcgaagggatggtgccccagtgggtgcaaccgccgccgacgttatggtagcgctcaataaccgctactctggctccctgttttaccagacccatagcagcaccttcgccgccggggccggaaccaataactattgcgtcgtaatcgtaggaatgtggcatggcaaggcttacctgttcttatacataaaagcaacagaatcataacatcattgccagggtaacccaattatcgttgtgcttttttcgggcagtggagcacaaaccgcccgtaaacaatcattcacaaagccaggtaaacagattaattttattctctggtatagtgccaacgggcctttggaaggattcaactatcgtgatgggcgtaagagcacaacaaaaagagaaaacccggcgttcgctggtggaagccgcattcagtcaactgagtgctgagcggagttttgccagtttgagcctgcgtgaagtggcgcgcgaggccgggattgcgccaacgtccttctatcgtcatttccgtgatgtggatgaactgggcctgaccatggtcgacgagagcggtttgatgctgcgccagcttatgcgtcaggcgcgtcagcgtatcgccaaaggcggcagcgtgatccgcacctccgtgtcgacatttatggaatttatcggcaataaccctaacgcgtttcgcctgctgttgcgtgagcgttccggaacgtcagccgcgtttcgtgccgccgtcgcgcgtgaaattcagcatttcatcgcggaacttgccgactatcttgaactcgaaaaccatatgccgcgtgcgtttactgaagcacaggccgaggcgatggtgacgattgttttcagcgcgggtgccgaagcgctggatgtcagcattgaacaacgtaagcaactcgaagagcgactggtattgcagctgcggatgatttctaaaggtgcgtactactggtatcgccgtgaacaagagaagttggcacatcaaaacgatgagtgaaggtgagtaatgaaacagtcaggtcaggataaaggaacgctgttgctggcattgatcgctggcttatccattaatggtacgtttgcggcgattttcagctcaattgtaccgttctcgattttcccgattatcgcgctggtgctgacggtgtactgcctgcatcaacgttatctgaaccgcaccatgcctgtcggattaccggggctggccgcagcctgctttattctgggtgtactgttgtacagcaccgtggtgcgcgcggagtatccggatattggctctaacttcctgcctgcggtactgtctgtggcgctggtgttctggattggctctcgcatgcgtagccgcaagagccagttgccggagtaatgaattatttgtagggcaggtaagcgtagcgccacctgccaaaaaatgccggatggcgctacgcttatccggcctacagatcaccgtgcggtaagtaaaacgccgcactccatatggtgtgtatacgggaactgatcgaacagcgccagacgttcaaccttgtgcgtctggcttaatgtttccagattcttgcacagcgtctccgggttacaggagatgtacaaaatacgcgggtacgcctgcaccatcttctcggtttcgctgtccaggccactgcgcggcggatcgacaaaaattgtctcacactggtagctcttcaaatcaatcccttgcaggcggttaaactcgcgtacgccgttcatcgcctgggtaaattcttctgccgccatacgaataatttgtacgttatcaatatggttagcggcgatgttgtactgcgcggcggccaccgacggtttggcgatttccgtcgccagcacgcgctcgaaattacgcgccagcgccagcgagaagttgccgttaccgcagtagagctccagcagatcgcccttagacccttctgtcgccttcagcgcccactccagcatctgcacgttcatggcggcgttcggctgggtgaagctgttctctacctgacggtaaaccatctctttacctgctaccggcagacgctcgtcgatgtaatcctggtccagcatgattttggttttggtcgcgcggccaatcaggtgcacgttgatgttctgtgcgcgcagcgcatcgcgcagggcttctgcctgctcgcgccactcgtcggtcagcgctttgtgatagagcagagaaacaatggcctgattgctttgagtggtcaggtagtcaatctggaacagcttgttgcgcagcaccggattattgcgtacaccgtcgatcattagcgtcatcagctggttgatgagctcactcgccgccggaaaactgtctacgcgaatgcgggatttcgtctgctgatcgaaaatgatgtggtacaggtcatcgccatcgtgccagatgcggaactcagcgcgcatacggtagtggctgaccggagaacgaaacacctcgggaaccggcgcgttgaaaggcgtcatcatactttgcaggcggacaactttttctgccagctgtgcgtcgtactgttctgtcgggaggtgttcgggggtcatgatgcgtcctgagtgataaagaattacgcggggattgtagggattgtgcagtggatgtccagatttaatggctaatagctatctggacatctatacgtgtctaattgtagcattctgtttccggtctcctgagagtgaaaagggaatccagtgcaaatctggagctgacgcgcagcggtaaagactggcgggatgagagttgtagacactgtgaaaatgggaagtcttcatccgtataacgccacccagcccgaagacctgccgggatcacgtcgcatttggtttcatcatcgcgtgctatcgatgaggcctgcggcatccttcttatattgtggatgctttaacaatgattaaaaaagtatcgctgttgacggcgttttccgtcacggcattttcgggctgggcgcaggaaagcgccgactcgttggtggtgacagcaaaccgtttcgaacaaccagcaaaaaccgttctggctccgacctccgtcgtgacccgtgaggatattgaacgctggcaggcaacgagtgttgtggaaatcatgtcacgcctgccgggtgtggacatcgcacaaagcggcgggatggggtcaacctcttcaacgtttattcgcggtacggaatcccgccatgttctggtactgattgatggtatccccctgaataatgccgggatcagcaatgttcccgatttaagccaaattccgacgtcgctgattcagcgtattgagtacattcgcggcccacgttcggcgctgtatggctccgacgcgattggcggtgtgattaacatcattaccgggcgcgacaagccgggtgcagaaatttctgcgggtgtcggttcaaaggggtatcaaaactataacggtgccttccagcaggtgttcgataaaaccaaaatcaccatggccggtgattatacctatacccgtggttttgatattgccgcaaaagatgccccgcgccagccagaccgcgatggttttatgagtaaatcgctgtttggctcggtggagcagcagtttaccgacagcgtcagcggattcgtccgtggctttggctacgataaccgctccgcgtatgacggttacgatcactatggcgcgaccggcattgatgggcggccggacacgcgtcaggtttacagccagaactgggacaccgggttgcgctataaccagggtattttccagtcacagctggtgacagggtatggccgtagcaaagatcagaactatgatccgaaaaaaggccgctacgctgactccgcaaccatggatgacgtgaagcagtacaccacccagtggctgaatacggttgaagtggggcacggcaatatcggcgcgggtctggactggcagaagcagaaaacccaggcgggtacgggctatctnnnnnnnnnnnnnnnnnnnnnnnnnnnnnnnnnnnnnnnnnnnnnnnnnnnnnnnnnnnnnnnnnnnnnnnnnnnnnnnnnnnnnnnnnnnnnnnnnnnnnnnnnnnnnnnnnnnnnnnnnnnnnnnnnnnnnnnnnnnnnnnnnnnnnnnnnnnnnnnnnnnnnnnnnnnnnnnnnnnnnnnnnnnnnnnnnnnnnnnnnnnnnnnnnnnnnnnnnnnnnnnnnnnnnnnnnnnnnnnnnnnnnnnnnnnnnnnnnnnnnnnnnnnnnnnnnnnnnnnnnnnnnnnnnnnnnnnnnnnnnnnnnnnnnnnnnnnnnnnnnnnnnnnnnnnnnnnnnnnnnnnnnnnnnnnnnnnnnnnnnnnnnnnnnnnnnnnnnnnnnnnnnnnnnnnnnnnnnnnnnnnnnnnnnnnnnnnnnnnnnnnnnnnnnnnnnnnnnnnnnnnnggcgtgttcctttcggcgatgcagcagttcaacagcgtgacgctggaagcggcggcgcgtaatgacgataactctaattttggcaatcacgccacctggcagtccagcgccgcatgggagttcatcgaggggtatcgcatcatcggttcttacggtacagcgtataaagcaccgaccatgagccagatccacagtaaagattacggtaatccggatctgaagccagaagagagtaagcagtgggaaggcggctttgaaggtctgacggggccggtaaactggcgtgtgacgggctatcgtaatgatatcgataacctcattaatagcgacccgcggacttaccgttattacaacgtcgatgaagcccgtattaaaggaatcgaggcgacggcccagttcgacactggcccggtagggcatcagatttcttacgactacgtcgacccgcgtaatgcgaaaactaacgaagtcctggctcgtcgctcaaagcaacaggttaagtatcagcttgactggcaggtgtgggatctcgactggaatctggcgtaccgttatctgggcactcgctatgatgttgccgttgatccgaatacctatgcaacagaacgcgtgaaaatgggcggcgtcagcctgtgggacgttgcggtttcatatcctgtcacctctcatctcacagttcgtggtaaaatagccaacctgttcgataaagattacgagacagtttatggctaccaaactgcaggacgggaatacaccttgtctggcagctacaccttctgatccgcgtcccaccgtgctggtgtttgattccggcgtcggtgggctgtcggtctatgatgagattcggcagctcctgccggatctccattacatctacgccttcgataacgtcgccttcccgtatggggaaaagagtgaagactttattgttgagcgtgtggttgaaatcgtcaccgcggtacaaaagcgttatcccctggcgctggcggtcattgcctgtaatacggcaagcacggtctctcttcctgccctgcgcgaaaaattcccgttcccggttgtgggcgttgttccggcaatcaaacccgcggcgcgtctgacggcgaacggcattgtggggttgctggctacgcgcggtacggtaaaacgtccttatacgcgtgagcttatagagcgctttgccaatgaatgccagatcgccatgctcggctccgcggagctggtggaaatggcggaagcaaaactgcacggcgagacggtatcgcttgaagagctgcgccgtattctgcgtccatggctgcggatgcaggaaccaccggatacggttgttcttggctgcacccatttcccgctattacaggaagagctgttaaaggttctgcctgaagggacccggctggtggattccggtgctgcaattgcgcgtcggacggcctggctgctggaacacgaggcgccggatgcgaaatcagcggatgcgaacatcgctttctgtatggcgataacaaaagaaaccgaacaacttttgcccgttttacgtcgttatggcttcgaaacgctcgaaaaactggcgctgtagcacggttttgagcaaaaaagagacggttgaacgtttttttcaaagaggggttgtcaacgtcggagaactccctataatgcgcctccactgacacggaacaacggcttacaagccgccgggacagcggggttcagagatgaacgccaacagagaaaagtgaaaataattgcttgactctgaatgaggaaaacgtaatatacgggacctcgcaacgattgtctgtctcttcgccaaaacaccttcggcgttgtaaggttaagcctcacggttcattagtatcggttagctcaacgcatcgctgcgcttacacacccgacctatcaacgtcgtcgtcttcaacgttccttcaggagacttaaagtctcagggagaactcatctcggggcaagtttcgtgcttagatgctttcagcacttatctcttccgcatttagctaccgggcagtgccattggcatgacaacccgaacaccagtgatgcgtccactccggtcctctcgtactaggagcagcccccctcaattctccagcgcccacggcagatagggaccgaactgtctcacgacgttctaaacccagctcgcgtaccactttaaatggcgaacagccatacccttgggacctacttcagccccaggatgtgatgagccgacatcgaggtgccaaacaccgccgtcgatatgaactcttgggcggtatcagcctgttatccccggagtaccttttatccgttgagcgatggcccttccattcagaaccaccggatcactatgacctgctttcgcacctgctcgcgccgtcacgctcgcagtcaagctggcttatgccattgcactaacctcctgatgtccgaccaggattagccaaccttcgtgctcctccgttactctttgggaggagaccgccccagtcaaactacccaccagacactgtccgcaacccgggtaacgggtctacgttagaacaccagccattaaagggtggtatttcaaggttggctccacgcagactggcgtccacgcttcaaagcctcccacctatcctacacatcaaggaccagtgttcagtgtcaagctatagtaaaggttcacggggtctttccgtcttgccgcgggtacactgcatcttcacagcgagttcaatttcactgagtctcgggtggagacagcctggccatcattacgccattcgtgcaggtcggaacttacccgacaaggaatttcgctaccttaggaccgttatagttacggccgccgtttaccggggcttcgatcaagagcttcgcgttgccgctaaccccatcaattaaccttccggcaccgggcaggcgtcacaccgtatacgtccactttcgtgtttgcacagtgctgtgtttttaataaacagttgcagccagctggtatcttcgactgatttcagctccgcccgcaggggcttcacctacacatcagcgtgccttctcccgaagttacggcaccattttgcctagttccttcacccgagttctctcaagcgccttggtattctctacctgaccacctgtgtcggtttggggtacgatttcgtgttacctgatgcttagaggcttttcctggaagcagggcatttatcacttcagcaccgtagtgcctcgtcatcacacctcagcgttaaaaggtaccggatttacctggaacctccgcctacatgcttaaaccgggacaaccgtcgcccggctgacatagccttctccgtccccccttcgcagtaacaccaagtacaggaatattaacctgtttcccatcgactacgcctttcggcctcgccttaggggtcgactcaccctgccccgattaacgttggacaggaacccttggtcttccggcgagcgggcttttcacccgctttatcgttacttatgtcagcattcgcacttctgatacctccagcatgcctcacagcacaccttcaacggcttacagaacgctcccctacccaacaacacataagtgtcgctgccgcagcttcggtgcatggtttagccccgttacatcttccgcgcaggccgactcgaccagtgagctattacgctttctttaaatgatggctgcttctaagccaacatcctggctgtctgtgccttcccacatcgtttcccacttaaccatgactttgggaccttagctggcggtctgggttgtttccctcttcacgacggacgttagcacccgccgtgtgtctcccgtgataacattcttcggtattcgtagtttgcatcgggttggtaagccgggatggccccctagccgaaacagtgctctacccccgaagatgagttcacgaggcgctacctaaatagctttcggggagaaccagctatctcccggtttgattggcctttcacccccagccacaggtcatccgctaatttttcaacattagtcggttcggtcctccagttagtgttacccaaccttcaacctgcccatggctagatcaccgggtttcgggtctataccctgcaacttaacgcccagttaagactcggtttcccttcggctcccctatacggttaaccttgctacagaatataagtcgctgacccattatacaaaaggtacgcagtcaccccataaagaggctcccactgcttgtacgtacacggtttcaggttctttttcactcccctcgccggggttcttttcgcctttccctcacggtactggttcactatcggtcagtcaggagtatttagccttggaggatggtccccccatattcagacaggataccacgtgtcccgccctactcttcgagttcacagcatgtgcattttcgtgtacgggactatcaccctgtaccgtcggactttccagaccgttccactaacacacaagctgattcagactccgggctgctccccgttcgctcgccgctactgggggaatctcggttgatttcttttcctcggggtacttagatgtttcagttcccccggttcgcctcgttaacctatgtattcagttaacgatagtgcaacggattgcactgggtttccccattcggacatcgccgggtcaagggttcatatcacctcgccggcgcttttcgcagattagcacgtccttcatcgcctctgactgccagggcatccaccgtgtacgcttagtcgcttaacctcacaacccgaagatgtttctttcgattcatcatcgacttgcgaaaatttgagagactcgaacacacatgagctgtgtgtcgtttcaattttcagcttgatccagatttttaaagagcaaaannnnnnnnnnnnnnnnnnnnnnnnnnnnnnnnnnnnnnnnnnnnnnnnnnnnnnnnnnnnnnnnnnnnnnnnnnnnnnnnnnnnnnnnnnnnnnnnnnnnnnnnnnnnnnnnnnnnnnnnnnnnnnnnnnnnnnnnnnnnnnnnnnnnnnnnnnnnnnnnnnnnnnnnnnnnnnnnnnnnnnnnnnnnnnnnnnnnnnnnnnnnnnnnnnnnnnnnnnnnnnnnnnnnnnnnnnnnnnnnnnnnnnnnnnnnnnnnnnnnnnnnnnnnnnnnnnnnnnnnnnnnnnnnnnnnnnnnnnnnnnnnnnnnnnnnnnnnnnnnnnnnnnnnnnnnnnnnnnnnnnnnnnnnnnnnnnnnnnnnnnnnnnnnnnnnnnnnnnnnnnnnnnnnnnnnnnnnnnnnnnnnnnnnnnnnnnnnnnnnnnnnnnnnnnnnnnnnnnnnnnnnnnnnnnnnnnnnnnnnnnnnnnnnnnnnnnnnnnnnnnnnnnnnnnnnnnnnnnnnnnnnnnnnnnnnnnnnnnnnnnnnnnnnnnnnnnnnnnnnnnnnnnnnnnnnnnnnnnnnnnnnnnnnnnnnnnnnnnnnnnnnnnnnnnnnnnnnnnnnnnnnnnnnnnnnnnnnnnnnnnnnnnnnnnnnnnnnnnnnnnnnnnnnnnnnnnnnnnnnnnnnnnnnnnnnnnnnnnnnnnnnnnnnnnnnnnnnnnnnnnnnnnnnnnnnnnnnnnnnnnnnnnnnnnnnnnnnnnnnnttttcatcagacaatctgtgtgagcactacaaaggcaggttctttaaggtaaggaggtgatccaaccgcaggttcccctacggttaccttgttacgacttcaccccagtcatgaatcacaaagtggtaagcgccctcccgaaggttaagctacctacttcttttgcaacccactcccatggtgtgacgggcggtgtgtacaaggcccgggaacgtattcaccgtggcattctgatccacgattactagcgattccgacttcatggagtcgagttgcagactccaatccggactacgacgcactttatgaggtccgcttgctctcgcgaggtcgcttctctttgtatgcgccattgtagcacgtgtgtagccctactcgtaagggccatgatgacttgacgtcatccccaccttcctccagtttatcactggcagtctcctttgagttcccggccggaccgctggcaacaaaggataagggttgcgctcgttgcgggacttaacccaacatttcacaacacgagctgacgacagccatgcagcacctgtctcagagttcccgaaggcaccaagcatctctgctaagttctctggatgtcaagagtaggtaaggttcttcgcgttgcatcgaattaaaccacatgctccaccgcttgtgcgggcccccgtcaattcatttgagttttaaccttgcggccgtactccccaggcggtcgacttaacgcgttagctccggaagccacgcctcaagggcacaacctccaagtcgacatcgtttacggcgtggactaccagggtatctaatcctgtttgctccccacgctttcgcacctgagcgtcagtctttgtccagggggccgccttcgccaccggtattcctccagatctctacgcatttcaccgctacacctggaattctacccccctctacaagactctagcctgccagtttcgaatgcagttcccaggttgagcccggggatttcacatccgacttgacagaccgcctgcgtgcgctttacgcccagtaattccgattaacgcttgcaccctccgtattaccgcggctgctggcacggagttagccggtgcttcttctgcgggtaacgtcaatcgacaaggttattaaccttatcgccttcctccccgctgaaagtactttacaacccgaaggccttcttcatacacgcggcatggctgcatcaggcttgcgcccattgtgcaatattccccactgctgcctcccgtaggagtctggaccgtgtctcagttccagtgtggctggtcatcctctcagaccagctagggatcgtcgcctaggtgagccgttaccccacctactagctaatcccatctgggcacatccgatggcaagaggcccgaaggtccccctctttggtcttgcgacgttatgcggtattagctaccgtttccagtagttatccccctccatcaggcagtttcccagacattactcacccgtccgccactcgtcagcaaagcagcaagctgcttcctgttaccgttcgacttgcatgtgttaggcctgccgccagcgttcaatctgagccatgatcaaactcttcaatttaaaagtttgatgctcaatgaattaaacttcgtaatgaattacgtgttcactcgttgagacttggtattcatttagtgtccgaggacattaagaatccatgtcactttgagtgcccacacagattgtctgataaattgttaaagagcagttnnnnnnnnnnnnnnnnnnnnnnnnnnnnnnnnnnnnnnnnnnnnnnnnnnnnnnnnnnnnnnnnnnnnnnnnnnnnnnnnnnnnnnnnnnnnnnnnnnnnnnnnnnnnnnnnnnnnnnnnnnnnnnnnnnnnnnnnnnnnnnnnnnnnnnnnnnnnnnnnnnnnnnnnnnnnnnnnnnnnnnnnnnnnnnnnnnnnnnnnnnnnnnnnnnnnnnnnnnnnnnnnnnnnnnnnnnnnnnnnnnnnnnnnnnnnnnnnnnnnnnnnnnnnnnnnnnnnnnnnnnnnnnnnnnnnnnnnnnnnnnnnnnnnnnnnnnnnnnnnnnnnnnnnnnnnnnnnnnnnnnnnnnnnnnnnnnnnnnnnnnnnnnnnnnnnnnnnnnnnnnnnnnnnnnnnnnnnnnnnnnnnnnnnnnnnnnnnnnnnnnnnnnnnnnnnngttctccgcaggctgcaaccgctaaatgacagaaaaatgactgactgctgcattccacagcaaaaccccgccttatacctttttacacacagacttatccacaatgatacgaaaaagtaaaaatatgcgagcgttgcgcaaacgttttcgttaaaatgctcgcgcttcacaaggatgcctcgtcaggtgtgttagatgagtttttcacaggaaaattcatctaacgctctctgtaatcgtgaaatccaggggatttaccatgcaacaacgtcgtccagtccgccgcgctctgctcagtgtttctgataaagccggtatcgtcgaattcgctcaggcactttctgcacgtggcgtagagctgctttctacaggcggtaccgctcgcctgttagcagataaaggtctgccggtaaccgaagtgtccgattacaccggtttcccggaaatgatggatggacgcgtcaaaaccctgcatccgaaagtgcacggcggtattctgggccgtcgcggtcaggacgacggcattatggagcagcacaatattgcccccatcgacatggtggttgttaacctctacccgttcgcccagaccgttgcccgcgaaggctgttctctggaagacgctgttgagaatatcgacatcggcggcccgaccatggtgcgctccgcagccaagaaccataaagatgtggccatcgtggtaaagagcagtgactacaacgccattattaatgagatggatgccaacgaagggtccctgacgcttgaaacgcgtttcgatctcgccatcaaagccttcgagcataccgccgcctacgacagcatgatcgccaactacttcggtagcctggtacctgcctaccacggtgaaagcaaagatccatctggccgcttcccgcgcacgctgaacctgaacttcattaagaagcaggatatgcgttacggcgagaacagccaccagcaggctgccttctatatagaagaagaggtaaaagaagcctctgtagcgactgcccagcaggtacagggcaaagccctctcctataacaacattgccgataccgacgccgcgctggaatgcgtgaaagagttcagcgagccagcctgcgttatcgtcaagcacgccaacccatgcggcgttgcggtaagtgcgtctattctggaagcttacgatcgcgcctacaaaaccgacccgacctccgcgttcggcggcattatcgccttcaaccgcgagctggatgcggaaaccgcgcaggccatcatctcccgtcagtttgtcgaagtgatcatcgcgccatcagcatccgaagaggcgctgaaaatcaccgcggcgaaacagaacgtgcgcgtactggtttgcggccagtgggcagaacgcgtcccgggcctggacttcaagcgcgtgaacggcgggctgctggttcaggaccgcgatctgggtatggtgggcgaagccgatctgcgtgtcgtcaccaaacgtcagccaaccgagcaggaactgcgtgacgcgctgttctgctggaaagtggcgaagttcgtgaaatccaacgccatcgtctacgccaaagagaacatgaccataggaataggcgcaggccagatgagccgcgtttactctgcgaaaatcgcgggtattaaagcaggtgacgaaggtctggaagtcgaaggttccgccatggcctctgacgccttcttcccgttccgcgacggtatcgacgcggccgctgctgtgggcatcacctgtgtgatccagcctggcggttcaatccgtgatgacgaagtgattgccgctgccgacgagcatggcatcgcaatgatcttcaccgacatgcgccacttccgccattaattcccggagcagaaaatgaaagtattagtgattggtaacggcgggcgcgagcacgccctggcgtggaaagcagcgcagtctccgcaggttgaaaccgtctttgtggcaccgggtaacgccgggaccgcgctggagcccgcactacagaacgtcgccatcggcgtaaccgacatcccggcgctgctgagctttgcccaaaacgagaatatcgatctgacgattgttggcccggaagcaccgctggtgatcggcgttgtagatgccttccgcgccgcgggcctgaaaattttcggcccaacggaaggggctgcgcagctggaaggctcaaaagccttcaccaaagattttctcgcgcgtcataacatcccgacggcggaatatcagaacttcaccgaggtagagcctgctctggcttacctgcgtgaaaaaggcgcgccgattgtgatcaaagccgacggcctggctgccgggaaaggcgttatcgtggcgatgacactcgaagaagcagaagccgccgtgcaggatatgctggcgggtaacgcctttggcgacgcgggccaccgcatcgtgattgaagagttcctcgacggcgaagaagcgagctttatcgtgatggttgacggcgagcacgttctgccgatggccaccagccaggatcacaagcgcgtaggcaatgccgacacggggccaaacaccggcgggatgggtgcttactcccctgctccggtggtcactgacgaagtacaccagcgcaccatggaccgcatcatctggccaaccgtgaaagggatggcggcggaaggcaatacctacaccggtttcctttacgcaggcctgatgatcgacaagcagggtaacccgaaggtaattgaattcaactgccgcttcggcgatccggaaacccagccgatcatgctgcgcatgaagtccgatctggttgatctgtgtctggcggcgtgcgaaggcaagctggatgagaaaacctccgagtgggacgagcgtgcctctttaggtgtggtgattgctgcgggtgggtatccgggtagctacaacaccggagatgagatccacggcctgccgctggaagagattgacggtgcgaaggtgtttcacgccggtacgaagctctctgacgacgaccgcgtgctcaccaacggcggtcgcgtgctgtgtgcgaccgcgctgggccagaccgtggcagaggcgcagaagcgcgcctatgcgctgatggcggatattcactggaatggcagcttcagccgccaggatatcggctatcgtgccattgcgcgggagcagggagagtaatttcacaccctcaccctaaccctctcccacagggagaggggatttacgtcagaaactcttctctgtcggctgccaggtgcagaaatcttcattcgccaccagcaacagctgagagccttccggcgcttccagccatgccacactcacctccacagatgaatgccgctgacgacgctgaatgtgttcggttgcccaggattcaagctcaggcttcaccgtctgcccttcgcaggtagtcaccgtgccgtcggcatgccagcgcccctggcgcaacaccacacggccctgacgcagcgcatcgctggtctggcggagttgttcagcacgatagcggtagagggcgacctgatcgctggacagctgctgtttcagtccactgacctcatgctgcataaagctcagctcgccgtggtcgtcgaaacgcaccttcacgtgttcgggagtcttactgtagatattcagttcaatgagcgacagcgcatcgccctgccagcggtattctgcggtcgaggtgttgccgttatgccacggactgaacgcggtgagcatatggacttcatcgctggaatctttgcgccagatcctgaccgcaccctggttgtcagcgtagccgctggcggtaaacggggggagtgaggaatcatggctacaggcagagagcaacagtacgcctgccagcgcgagcgttccacgccagaatgacaaaaggggcgttgccgccccttcgttaaaactgttcactgccacgcgtcttacttaactgcgtctttcagtgctttaccagaaacaaatgccggcacgttagctgcggcgattttgatttctttaccggtctgcgggttgcggccagtacgctcagcgcggtggttcactttgaaggtaccgaaaccaaccagttgtacagcatcgccttctttcagagactcagtaatagcagccagggtagattccagagcagctttagcctgcactttagacagatcagccttgtccgcaattacatcaatcagttgagtcttgttcataagttatcctttcaatgtgtttatcgcttgctaagcatcgagtgcgacgaaaatgccaaaaaagcactctcctgcatacacgcaccgatagccactttttttcgtccccccaaatgtagaccagacggggggcgaaagggaagagtcgaggagtgacaaaacaggcgttaaatcacgttttgttgtctcattggttaaaaattataccaatattgctctcaccggcctcgcgaaggtccgcgcgaagccctttgatcagctcaatatcacgttcttcacactccgccagcagacggaaaatttcccactgaatatcccattcctgttcaaccgccgggttagcacgcagctcctcgtcggtcatttcacggccttcctgggtcatttccagcatcgcaacagtggtaatggatgccttactgacttcaatggcgtgttccagggtttcaccgctcagacgggagtggatcagctcgctcaacgccacacaggcatcaatggccgggtagacgccatacaggtcgaaatcatccgcagccggaatagcctcttccagcttttcgagctgagagtcaaaatttaccttcgcatctttgaccgtcagcgtctcccagattaaatccaggatacgacgataaatctggccttcgccaaacgccgtctgcttgcagaacgcggcatagttgagatacatgcgctcgcacaggcaagccataaacgtcacgtgctgccagctttccagcttctcaaggcgcagatgaatcgggttttgtaacatgatgatgtctcgaatcgaaaattagccgcagtttacctgaatcacggctgaatttcctgccaacgaatgaatgccggacgtgaagaggccacggcgtcagcccagcgggttggctccggtaaacggtagcccttcatacagcgttgcacccacgccagtgcgctatccatgctgacccgatgcccggtggcgataaacaacgggttgcagcgcgctttactgcgccagacccacgccagctgctcgcctttatggataagcggcgccagtgcgcccggttcggcagagagcggctcaaacgcgccgcacaggcgttttttcgctacgccgatggtcggcacgtccaccagcagaccaaagtggctggcgacgcctaagcgacgcggatgggagataccatgcccatcaacaaacagtagatcgggtttttgcgagagttgctcccacgcggccagcagcgcgggatattcgcggaaggagagaaagccggggatatagggcatggtggtggcgatacgcgccaccttgtactccaccagctccagcgaagggtatttcagcaccaccatcgccgctcgcgtcacttcaccgccctgctcaaatccgacgtccgccccgccaatgtaccgcggagggtccgtatccagacgatcctcgcggatcactgatgaagccagttcgatttgctgagcgcgtagcgacgcgagatccataaccactccttactgatgatactgggcagaaagccgatgcaccgcctccacaaatacgccagcgtgttctggcggtacatcctgatgaataccgtgaccgaggttgaagacgtggccttcgccctggccgaaaccagacagtatagtcgacacttcttcttcgatgcgggcaggctgcgcatagagcatggacggatccatgttgccctggagcgctactttgtcccccacgcgacggcgcgcatcggctatatcggtggtccagtcgaggcccagcgcgtcgcagccggtggccgccatcgcttccagccactgaccgccgcctttggtaaacagcgtcaccggcacgcgacggccttcgttttcacgcagcaggccatcgacaattttgtgcatgtagtacagggagaactgctgataatcacgtccggtcagcacgccgccccaggtgtcgaaaatcatcaccgactgcgcgcccgctttaatctgcgcgttgagatagagcgtgacgctcttcgccagcttgtcgagcagggcatgcagggccagcggctcggcgtacatcatctttttgatcacggtaaaggctttgctgctgccgccttccaccatataggttgccagcgtccacggactaccggagaagccaatcagcggcacgtcgcctttcagttcgcggcgaatggtgcgcacggcgttcatcacatagcccagctcgccttcaggatcggggatcggcagcttatcaacgtcagctttgcttttgatcggagaggtaaaacgcgggccttctccggtttcgaaatagagcccaaggcccatcgcatccggaatggtgagaatgtccgaaaaaagaatggcggcatcgagcgggaagcggcgcagcggctggagcgtcacttcacaggccagctcggcgtttttgcacagcgacataaaatcgcctgcctgcgcgcgcgtggctttgtactctggcagatagcgtcccgcctggcgcatcatccacaccggggtgacatcaacgggctggcgcagcagcgcacgcagataacgatcgttcttcagttcggtcattttgcagttccttattgcgtcagtccgtcagtgtaacactactcatactcggcccgacacattgccacggtatcttctatcaggcgacgcgccaccgttcccggtgggggcagcagcggtaaatcgtcgtagcgataccagttcgcctccagcagctctttctgatcgataacaatctcgccgctgtcgtattccgccataaacgcggtcatcagggacatcgggaacggccacggctgcgatgtcacatagcgcaggtttttcaccttaatgccgctctcctccatcacctcgcgcgccaccgcctgttccagcgtttcgccgacttccacgaacccggcgaggacggtgtgaatgccgttgcgatggcgggtatgctgcgccagcaggatggaatcatcacggcggatggcgacaatgatgcacggtgcgatttgcgggtaatagcgttcacggcagtggccgcagagcattgcccactcggttttgctcgggtgcatggtgtggccgcagtagccgcagtatttgtgcgagcggtaaaactccgccagctgcacgccgcgccccgccagctggaacaggccgacatcccgatccaacacctgacgaacggatcccatatcctgacgacgagcctgttggatcaaccataccggatcgccctgccactcgccgatccgcagcgccggttggccgacgagatcgaagatgtctgccgcaccgtagggtatctccccaccgggcagccataatttttgttcgtgactgacgatccaccaacccagatctgatttttcaataatacgatccatatctattgcactaccttcgcttcactgacatgttgttagcattatggttacattttggataagcagatcccattctaaaccttatggagtcgaccatgttaaaccagctggaaagcctgactgagcgcgttggaggaagtaacaccctggtggatcgctggctacatgtgcgcaagcatctactcgtggcgtattacaatctggttggtcttaagcctggcaaagaatcctttatgcggctgaatgaaaaagcgctggacgacttctgtcagagcctggtcgactacctttccgacggccatttcaacctttatgaacgcattatccgcgaaatggaagggacaacgccgtatttagcggccagcaaactctgtccgctgctggaagccaacacccagcagatcatggactattacgattccacgctagagaacgctatcgatcacgataactatcttgagtttcagcaggcgctttccgaccttggcgaagcgctggaagagcgattcacgctggaagacaagctcatcgccctcgtgctggacaacaacctgaatatcagcaccagcgataacgttgcgcgccctgcttgagttcttaatcgttaacgagtaatttacaaccattcgcccctctcacgagggggatttttcttgtcggagtgcccagtgtgaaagcacgggctgagaccgttaattcgggatccgcggaacctgatcaggttaatacctgcgaagggaacaagagtcacactgctgttgtatcgcccctgaggtgatcttctcttgcttcatccgtcgtctgacaagccatgtccttcacatctggaatgagctatgtctacaacaaaactgacccgccgcgaacagcgcgaacacgcacaacgcttcatcgacaccctggaaggcaccgctttcccgaactcaacgcgcatctacatcaccggttcacaggctgatatccgcgtgccgatgcgcgaaatccagctcagcccgacgcttatcggcggcagcaaagaaaacccgcagtttgaagacaacgaagccgtgccggtgtatgacacctccggcccgtacggcgacccttctgttgctatcaacgtacagcagggtctggcaaaactgcgccagccgtggattgacgcccgtaacgactgcgaagaactgagcgtgcgcagctcggcgtataccaacgcgcgcctggccgacgacggtctggacgagctgcgctttaccggcctgctgacgccgaaacgcgctaaagcgggcaaatgcgtcacccagctgcactacgcgcgccagggtatcgtcacgccggagatggagttcatcgccatccgcgaaaacatgggccgcgagcgcatccgcagcgaagtgctgcgccaccagcatccgggtgaagggtttggcgctcgcctgccggaaaacatcacgccggaatttgtgcgtgacgaagtggccgccgggcgcgccattatccccgccaacatcaaccacccggaatccgagccgatgattatcggccgcaacttcctggtgaaggtcaacgccaacatcggcaactcagcggtgacgtcatccatcgaagaagaggtggaaaagctggtctggtcgacgcgctggggcgcggacacggtgatggacctttccacgggccgctatattcacgaaacccgcgagtggatcctgcgtaacagcccggtgccgatcggtaccgtcccgatttatcaggcgctggagaaggtaaacggcatcgccgaaaacctcacctgggaagcgttccgcgacacgctgctggagcaggccgagcagggcgtggactacttcaccatccacgcgggcgtgctgctgcgctacgtgccgatgacggcgaaacgtctgaccggtatcgtctcacgcggcggttcgattatggcgaaatggtgcctttcccatcatcaggaaaacttcctctacgagcacttccgcgaaatctgcgaaatttgcgccgcttacgacgtctccctgtcgctgggcgacggcctgcgcccgggctccatccgcgatgctaacgacgaggcgcagtttgccgagctgcacacgctgggcgagctgaccaaaatcgcctgggagtacgacgtgcaggtgatgattgaaggcccgggccatgtgccgatgcagatgatccgtcgcaacatgaccgaagagctggagcactgccacgaagcaccgttctacaccctggggccgctgaccaccgatattgcgccgggatacgaccacttcacgtcaggcattggcgcggcgatgatcggctggttcggttgcgccatgctctgctatgtgacgccgaaagagcacctcgggctgccaaacaaagaggacgtgaagcaggggctgatcacctacaagattgccgcccacgcggcggatctggcgaaaggccatccgggcgcgcaaattcgcgacaacgccatgtccaaagcgcgctttgaattccgctgggaagaccagtttaacctggccctcgatccgttcaccgcccgcgcctatcacgacgaaaccctgccgcaggaatcgggcaaagttgcgcacttctgctccatgtgcggacctaaattctgctcgatgaaaatcagccaggaagtacgcgattacgccgccgcgcagaccattgaagtcggcatggcggacatgtcggaaaccttccgcgcgaaaggcggcgaaatctacctcaaaaaagaggaggcataatgtaccagcctgatttcccccctgtccccttccgcttagggctttacccggtggtggacagcgtggcgtggatcgcccgcctgctggaagctggcgttcgcaccctccagctacgcatcaaggataaacgcgatgaagaggtggaggccgacgtgatcgccgctatcgcgctgggacgtcgctaccacgcccgcctgtttatcaacgactactggcggctggcggttaaacaccaggcgtacggcgtgcatctgggacaggaagatctggaaacgaccgatctcaacgcgatccgtgacgccggtctgcggctgggcgtctccacccacgacgttatggagatcgacgtggcgctggcggcccgcccctcttacatcgcgctcgggcacgttttcccaacgcaaaccaaacagatgccgtccgctccacagggtttgacgcagctggcggcccacgttaagcgccttgccgattaccccaccgtcgccatcggcgggatcagtcttgaacgtgcgcccgcggtgctggagaccggcgtcggcagtatcgccgtcgtcagcgctatcacccaggcggcagactggcaggccgccaccgcgcagcttttacaactggcaggagcaggtgatgaaagatcgtgattttatgcgttacagccgccagatcctgctggaggatatcgccatcgaggggcagcaaaagctgctcgccagccgggtactgattgtcggtctgggcggattaggcacccccgccgcgctgtatctggccggcgcgggcgtgggcacgctggtgctggccgatgacgacgaggtacatctcagcaatctgcaacggcaaattctctttacgacagaagatatcaaccagcctaaagcgcacgttacgcgccagcggctgaaccagcttaaccccgatatcgaactggtcgcactccagacgcggctgagcggggaagatctgcaacgcgaagtggcccttgccgacgtggtgctggactgtacggacaatatggcgacacgtcaggccatcaacgcggcctgtgttgcgcagaacacgccgctgatcaccgccagcgcggtcggtttcggtgggcaaataatggtgcttacgccgccgtgggcacagggctgctaccgctgcctgtgcccggacgaggctgaaccggagcgtaactgccgcacggcaggcattctgggcccggtggtgggcgtgatgggtactcttcaggcgctggaggccatcaagttgctcagcggcatggagacagaacgcaacacgctgcggctgttcgacgcccgctccagcggctggcgtcatctggcgttaaaccgtgccagccactgcccggtatgcggaggccgcaatgcgcattctgtttaacgatgagccgatgacgtgcgacgacgatctcaccgttgccgccctgctcgacatgctgcgccagctgaagccgggaacggcgctggcgctcaatcaacagatcctgccgcgcgagcggtgggaacatcagcaggtcaatgagggcgaccagatcctgctgtttcaggttatcgcagggggctgagatgttacgtattgccgacaaagtctttgattcacatctgtttaccggaaccggaaaattcgcctccccgcaactgatggtggatgccattcgtgaaagcggcagccagctggtgacgctggcgatgaagcgcgtggatctgcgtcagcacaacgatgccatacttgcgccgttactggaggcaggcgtgacgctcttaccgaatacctccggtgcgaaaacggccgaggaagcaattttcgctgcgcaactggcgcgggaagcgctcggcacccgctggctgaagctggaaattcacccggacgcccgctggctgttgcccgatccgatcgaaaccctgaaagcggcagagaagctggtgcagcagggattcaccgttctgccctactgtggtgccgaccccgtgctctgtaagcgtctggaagaggtcggctgcgcggccgtaatgccgctgggcgcccccattggctccaaccaggggctggagacccgcgcgatgctggaaatcattattgagcaggcgaccgtgcccgtggtggtggatgcgggcatcggcgtacccagtcacgccgcgcaggcgctggagataggggccgatgcggtgctggtcaataccgcgattgcggtggccgacgacccggtgatgatggcgcgtgcgttccgccttgccgtggagtccggtctgctggctcggcagtccggtcccggctcgcgcagtgttcaggcgcaggccaccagcccgctgaccgattttctggaggcgctctgatggctacctttaccgatcgctggcgtcagcttaactgggacgatattgccttacgcatcaacagtaaaacctctgcggacgtagagcgggcattaacagccaaacatttgacgcgcgaggatttgatggccctgctttctccggcagccagcgcgtaccttgaaccgatggcccagcgcgcgcagcgcctcacccgccagcgctttggcaacacggtgagcttttacgtgccgctctatctttctaatctgtgcgccaatgactgcacctactgtggtttctccatgagcaaccgtattaagcgtaaaacgctggatgagcatgagatcgcccgcgagtgtgcggctattcgtgagatgggttttgaacatctcctgctggtgacgggtgaacatcagggcaaagtggggatggactattttcgccagcatcttccggccatccgccgcgaatttgcctcgttgcaaatggaagtgcagcctctgtcgcaggaggaatatgcggagctgaaaaccctcgggctggacggcgtaatggtttatcaggaaacctaccatgaggcgacctatgcccggcatcacctgaaagggaagaagcaggatttcatcttccggctggaaacgccggacaggctggggcgcgccggtatcgataaaattgggctgggcgcgcttatcggtctgtccgacagctggcgggtggactgctatatggtggcggagcatctgctgtggctacagcagcagtactggcaaagccgctattccatctctttcccgcgactgcgtccctgtacgggaggcgttgaacccgcctcgctgatggatgagcgccagctggtgcaaaccctgtgtgcatttcgcctgttcgcgccggaagtggaattgtcgctctccacgcgtgaatcccccgcgtttcgcgaccgcgcgatcccgctggcgatcaataacgtcagcgccttttccaaaacgcagccgggcggttacgcggacgatcacccggaactggaacagtttgcaccgcacgacggccgacggcccgaagcggtggcggaagccctgactgcacaggggctacagccggtgtggaaagactgggatagctggctgggaagagcctcgcattagcgctgaaactgtctgcaaaaatgcgaaaaggttacgaggcggctcgtaagatcataaccgggcgattgaggcgatctgcccggttttcttatgcttaaccacgtcagcaacggacgctgatcagggtgaaaatgcttcttcctcgtttcgccctgccctccgcctcttaaacaaaattcaattgatacaataaatacgtcgtttcttatctacgcttaagataaatcatctcgtcggtaatcgccttctgtataatttactaccagcaaccggacagcgactatgctgagggtatcgacagacgcaacgcgtctaccatctggattgatgtacaactcatggcactccacagtaaaaagctctcttttacccggccaattatggtcagcttcgcggggatcctgttcagtttcgcgctgatcgccgtcctggtcgtcctttcacagagaaaggattttcttgaggattatcataagattaatggtaacttcacccataatctggcggtgaactataccgaatccatcctgcgagaaaatgactatattcttggtcgcgctgcgatgtacttcgcccgtaatgacagagtgaatcagacaataaatatcgatccgacacacggtttgcagatgttgatgcatttgcagaacctgatgccgacggtgtcgtctatctctctggcggacacagaagggcgccatctgcgcgcgccggaagtgctgccaacggagaaaagtaagtcgttcgacgccagaacccgcccatggtttgtcgggcaagcggaagccagcaactttcctcactacacccgcccctatctggactatttcacccaacatcctactgtcaccctctataagccggtcatttcaccggaaggccgtctgaagggcacgctcgctttccatcttgatttaacgtccatggggtataccctgcgccagatggtggcgccggttcagggtgagttttttgtcgtggagcgtgacggcgccgttgtgctgcatccggacacgggggcgctctttaagcagtacgtaagcgaagcgctgatggacaaaatgaccagcggcgaaggccatcttttcgaccccaaaagtaaaacctggtattactactactctttcaccaatccggactggtttgtgatttatcgggtctccgatgccacgcttaccgtcatcacccggcatgaaaccaccgtcgtcggctggggatttgcgctggcggcaatcatcatcattttgttcgggctttaccttcgtcatgcctcgcgttctgtgctgatgaacattatcaacgccatcaaaaccggcgacgtcaaccaggcaccacgccttgaggcgatgctcagccataccattcgaaccaataaagaacgcgagctggcctatgtccgtcaggccacccatgatgcgctgacaggctgcaaaaatcgccgtgcgttcgataacgatgtggatgagctgcttactgctcatcaacccttcgttctggcgctgatcgacatcgataacttcaaatccattaacgacacctggggccacctgagcggggatattgtgctgcgcaacgtggcgcgggaaggtattcagatcatgcagccgcaccacgtttccgtttaccgctacggtggagaagagttcggcgtgatattcccggccgagctgatgaactccgcgcacgcgctactggaagcctggcgcaccgccgttgaaaagcggacctggcgggaagagaatctgcgagtgaccttcagcgccgggatgggggagtggcacttcgaaccgctggaacaatttatcggtagcgtagatgaagcgctgtataccgctaaacaacagggtaaaaaccgcatcgtaagcacggccagccgataatacccttcctcaaattctgcccgatctgacgggcagaatgctctccgctgtaaaattgtaaccggtttcaggaaaatgccgatttctttgtgatgcctgacacacaatcgcggtaaagcggttgttgaagcggtctgcacgggataattatcaataaacacatgtagatcgaggctgactatgaagaacatcgttttatgctgtgcagcgggaatgtcaaccagcatgctggttcaacgtatgaaagatgccgcgcagaaaaaaggagtcgaagtaaccattaaagccgttccggtcgcggagtttaaagataacatcgcgacggctgatatcgtattactggggccacaggttaaatacgaacaggcaaaactccaggcgcaggccgatccgctcggaaaaaaggttgcggtcatcgacatgatggattacggcatgatgaaaggtgatgccgtactggaaaaagcgctcaagcttctggagtcataatggaagacttagaaaccacgattatggaactgctggtcaacgcaggcgcagcgcgcagcgcggccctgacggcgttgcagatggcgcgaaaaggcgactttgatgaagccgagaaagcgatggaagaatcgcgtgaatatgtgaaacatgcgcatacgatccagacgcagcttatcggtcttgatgaagggaccgggaaacttccggttaacctgatcaccgttcactctcaggatcacctgatgaacgcgatggttattcaggatctggcgggcgatatgattgagctttatcgacgtatcccgttagtgaactgaagacatacagatgtaaaaaaacccgcctcggcgggttttttatttacggcatcaacgattactcgttgtcggaaccgcccagacctgcgttcagcagttctgcaaggctcgcggatgcatcttcggcagtcacctgcggtgcagctggcagttcgcccgctgcgcgacgacgcatacgatcctggtggtacgcataaccggtaccggccgggatcagacgacccacgataacgttctctttcagaccgcgcagttcatcacgtttacctgcaacagccgcttcggtcaggacacgagtggtttcctggaacgatgcagcagagatgaaggactcggttgccagagacgctttggtgatacccagcagatcgcgtgcgaaggtcgcaccgattttgccgttcgcttccagatcgcggttagcgatcttaacgcgtgagtattcaacctgctcgccttccaggaagtcggagctgcccgcgttttcgatggttgctttacgcagcatctgacgaacgataacttcaatgtgtttatcgttaatcttaacgccttgcagacggtatacgtcctgtacttcgttaacgatgtaacgggtaacagcatgcacaccacgcagacgcaggatgtcgtgcggcgcttctggaccatcggaaaccacgtcaccacgttctacgcgttcaccttcgaacacgttgagctgacgccacttaggaatcatctcttcgtacggctcgctgccatctactggcgtaataaccaggcggcgcttacctttggtctctttaccgaaggagatgataccgctgatttcagccaggatcgcaggctctttcggacgacgtgcttcgaacaggtccgcaacgcgtggcagaccaccggtgatgtccttggtaccgccggattcctgaggaatacgcgccagggtgtcaccagagctgatctgtacgccatcttccagctgtacaatcgctttacccggcaggaagtactgcgcaggcatatcggtaccagggatcagaacgtcgttaccctgagcatcaacgattttcagtgcaggacgcagatctttaccgccggtagtacgttcagcagaatccagaaccaccagagaagacagaccggtcagctcgtcggtctgacgagtaatggtctggccgtcgatcatgtcagtgaagcggatgaaaccacttacttcggtgataaccggcatggtgtgtggatcccagtttgcaacggtttcaccgccagcaacctgctcgccatcacctttcgccataaccgcaccgtaaggcactttatagctctctttggtacgaccaaattcgtcgatcagcttcagctcggtgttacgggaagtgataaccagtttaccgctggagttcacaaccgacttcgcgttgctgagcttgatgctacctttgtttttcacctggatgctggattcagcagccgcacgagatgccgcaccaccgatgtggaacgtacgcatcgtcagctgtgtacccggctcaccgatggactgtgccgcgataacgccgatagcctcacctttgttgatgatgtggccacgcgccaggtcacgaccgtagcagtgcgcacacacaccaaagtcggtgtcacaggatacaacggaacgcactttcacggagtcaacagagttcgcttccagcaggtcacaccactgttcgtgcagcagggtgttgcgtggaaccagaatgtctgcggtgcccggcttcagaatgtcttccgcggtcacacgacccagtacgcgatcgcgcagcggctctttaacatcaccaccctcgataaccggggtcatggtgataccttcgagggtgccacaatcgtcttcggtgacgaccagatcctgcgcaacgtcaaccagacgacgcgtcagataaccggagttcgccgttttcagtgcggtatccgccagacctttacgcgcaccgtgcgtggagatgaagtactggagtacgttcagaccttcacggaagttcgcggtgattggcgtttcgatgatggagccatctggcttcgccatcagaccacgcatacctgccagctgacgaatctgtgccgcagaaccacgcgcaccggagtcggccatcatgtagatgctgttgaaggagacctgctgctcttctacgccgtcacggttaatcacggtttcggtttgcaggttatccatcatcgctttagatacacgatcgttcgccgcagcccagatatcgataactttgttgtaacgttcgcctgcggttaccagaccagactggaactgctcctggatctcagcaacttcagcttccgcttcagagatgatctcgtgtttcttctctgggatgaccatgtcatcgataccaacagatgcacctgaacgcgctgcataagcaaagccggtgtacattgtctggtcagcgaagataacggtcggcttcagacccagaatgcggtaacaggtgttcagcattttggagatcgctttcttgcccagcgcctggttgacgatggagaaaggcagacctttcggtacgatcatccacagaatggcacggccaacggtcgtgtctttcaggctggtgtgcgcaacgaactcgccgttttcatctttttcgtattcggtgatacgcactttaacgcgcgcatgcagagaggccaggccagcgcgataaatacgctcagcttctttcgggccagtcagcaccatgccttcgcctttggcgttaacacagtcacgggtcatgtagtacagacccagtacaacgtcctgagaaggaacgatgataggttcaccgttcgctggagacaggatgttgttggtagacatcatcagcgcacgcgcttcgagctgggcttccagcgtcagcggtacgtgaacagccatctggtcaccatcgaagtcggcgttataggccgcacaaaccagcgggtgcagctggatcgctttaccttcgatcaggactggctcaaaggcctggatacccagacggtgcagagttggtgcacggttcagcagtaccgggtgttcgcggatcacttcgtccaggatatcccaaacgacagcttcttcacgctcaaccattttcttcgcggctttgatggtggtggcgaggccacgcagttccagcttgccgtagatgaacggtttgaacagctccagtgccattttcttcggcagaccgcactgatgcagacgcaggtatggacctacggtgattacagaacgaccggagtagtcaacacgcttaccgagcaggttctgacggaaacgaccctgcttacctttgatcatgtcggccaaagatttcagaggacgtttgttagaaccggtgatcgcacgaccacgacgaccgttatctaacagggcatcgactgcttcctgaagcatacgtttttcgttgcgtacgatgatgtccggcgcagccagatccagcagacgtttcagacggttgttacggttgatcacgcgacggtacagatcgttcagatccgacgttgcgaaacgaccaccatccagcggaaccagcggacgcagatctggcggcagaaccggcagaacggtcaggatcatccactctggtttgttaccagactgaacgaacgcttccagcagtttgatacgcttggtcagctttttacgcttggtttcggagttggtttcattcagctcttcgcgcagagtttcacactcttgctccagatccatgctcttcagcagggcctggatagcttccgcacccatcttcgcgtcaaattcgtcaccgaactcttccagcgcgtccagatactgttcttcggtcaggatctggttacgttccagattggtcatcccgccttcgataaccacataagattcgaagtacagaacacgttcgatatcgcgcagcggcatatccagcagcagaccgatacgggacggcagagatttcaggaaccagatgtgagcggtcggagacgccagctcgatgtggcccatacgctcacggcgtactttggtctgggtcacttcaacgccgcacttctcacagatcacaccacggtgtttcaggcgcttgtacttaccgcacaggcactcgtaatcttttactggcccgaaaatacgcgcacagaaaaggccgtcacgctcaggtttgaacgtacggtagttaatggtttccggctttttaacttcaccgaaagaccatgaacggatcatgtctggcgaagccagagcaattttgatcgcatcaaactcttcggttttagtttgcgctttcagaaactttaataagtctttcacggatttgctcccgtcggagttagcacactctgctgtcgggcgttaacccgacagcagtgacctgtttgagcgagaattactcgtcttccagttcgatgttgatacccagcgaacgaatctctttcaacagtacgttgaaggattctggcatgcccggttccatctgatggttgccgtctacgatgttcttatacatcttagtacgaccgttcacgtcatcagacttaacggtgagcatttcctgcaaggtgtatgctgcgccgtatgcttccagcgcccacacttccatctccccgaagcgctgaccaccgaactgagccttaccacccagcggctgctgagtaaccaggctgtaagaaccggtagaacgagcgtgcatcttgtcgtcgaccaggtggttcagtttcagcatgtacatgtaacctacggttaccggacgctcgaactgttcaccggtacggccgtcaaacagcgtaatctgaccagacgttggcagaccacccagttgcagcagctctttaatttcagcttcttttgcaccgtcgaataccggcgttgcaattggcatacctttgcgcaggttctctgccagacgcagcacttcttcatcgctgaaggtgttcaggtcgactttctgacgaacgtcggtacccagatcgtaggcacgctggatgaactcgcgcagtttcgcgacttcctgctgctgtttcagcatggcgttaatcttatcgccgatgcctttcgcagccatacccaggtgggtttccagaatctgaccgatgttcatacgagacggtacgcccagtgggttcagtacgatatctaccggcgtaccgttagcatcgtgcggcatatcttcgatcgggttgatcttagagataacacccttgttaccgtgacgacctgccatcttatcaccaggctggatctgacgtttaacagccagatacaccttaacaatcttcagcacgcctggtgccagatcgtcgccctgagtgattttgcggcgtttcgcttcgagttttttctcgaactcgtgtttcagttcgtcatactgctcagccagctgttccagctgattttgtttctcttcgtcggtcaggcccagttccagccagcgatcgcgtggcagtttgtcgagcttctcagcttcaacgccaccggcaaccagcaccgcatagatacggctgaacagacctgcttcgaggatttgcagttcttcagacaggtctttcttagcctgtttgagctgcatctcttcgatttccagcgcacgtttatctttctcaacgccatcacgagtgaagacctgaacgtcgataaccgtaccggaaacaccgtttggtacgcgcagagaagagtctttaacgtcagacgctttctcaccgaagattgcacgcagcagtttctcttctggcgtcagctgggtttcgcctttcggcgtgaccttaccaaccagaatgtcgccgccggtcacttccgcaccgatgtaaacaataccggattcatccagtttagagagcgcagcttcacccacgttagggatgtcggcagtgatctcttctggccccagcttggtgtcacgggacacacaggccagttcctgaatgtggatggtggtgaaacgatcttcctgaaccacacgctcggagacgaggatggagtcttcgaagttgtaaccgttccacggcatgaacgctacgcgcatgttctgaccgagcgccagttcaccgaggtcggtggacggaccgtctgccagcacgtcgccgcgctcaactggctcacccagagacacacatggcatctggttgatacaggtgttctggttagaacgggtgtacttggtcaggttatagatgtcgatacccgcttcgcccggatacatctcgtcttcgttaactttgataacgatacgggatgcgtcaacgtactgtacggtaccgccacgcttagcaactgcggtaacaccggagtcaacggcaacagcacgttccataccggtaccaaccagcggcttatcagcacgcagagttggaacggcctgacgttgcatgttcgcacccatcaatgcacggttggcgtcatcgtgttccaggaacgggatcagggacgcaccgacggataccacctgctgggtggatacgtccatgtagtcaacctggtcgcggctgaacaagctggattcgcctttgctacggcaggtaaccagatcttctacaaagtggccttcgtcatccaggttggagttcgcctgagcgataacgtagttgccttcttcgatagcagacaggtaatgaatttcgtcagtaacaacaccgtcggtcactttacgatacggggtctcgaggaaaccgtattcgttcgtctgtgcgtacacggacagggagttgatcagaccgatgtttggaccttcaggcgtttcgattggacatacgcgaccgtagtgagtcgggtgtacgtctcgaacttcaaagcctgcgcgttcacgggtcagaccgcctgggccgagtgcggagatacgacgtttgtgcgtgatctcagacagcgggttgttctggtccatgaactgagacagctggctggaaccgaagaactctttcactgccgcagaaatcggcttcgcgttaatcatatcctgaggcatcagggtatccagatcgcccagagacagacgctctttcaccgcacgctctacacgtaccaggccaacgcggaactggttttccgccatttcgcctacggaacggatacgacggttgccgaggtggtcgatatcgtccacttcgcctttaccgttacggatatcgatgagcttcttcatcacttcaatgatgtcgtctttgctcaggataccggaaccttcgatctcgtcgcgcagcagagaacggttgaacttcatacgaccaaccgcggacagatcgtagcggtcttcggagaagaacaggttctcgaacaggctttcagccgcttcgcgagttggtggctcaccaggacgcatcatgcggtagatttcgaccagcgcgctcagacgatcgttggttgggtcgacgcgtacagtctcagagatgtacggaccgtggtccagatcgttggtgaacagcgtttcgatacgtttgtggccagactggctcagcttagccagcagatccaggctcagctccatgttcgccgggcagatcagctcgccagttgattcatcaacgtaatctttcgcggctacttttcctgcaatgtattcaaccggaacttcgatgtgtttgatatcatctttttccagctggcggatgtggcgcgcggtgatacggcgacctttttccacatacactttgccgtcggcttcgatgtcgaacgacgcggtctcaccacgcagacgttccggtaccaactccatctgcaacttgttgtcgcggatttcaaagatcactttctcaaagaacaggtccaggatctgctcagtggtatagttcagtgcacgcagaatgatggttgcaggcagcttacgacgacggtcgatacggacaaacaggttgtcttttggatcgaattcgaagtccagccatgaaccacggtaaggaatgatgcgtgcgttatacagtactttaccggaagagtgcgttttacctttatcgctgtcgaagaagacgcccgggctacggtgcagctgggaaacgataacacgctcagtaccgttgataacgaaagtaccgttgtccgtcatgagtggaatttcacccatgtagacttcttgttctttaatgtcttttacggtgccttccggcgcttcgcgctcgtagatcaccagacgcagttttacgcgcagcggtgcggaataggtcacgccacggatctgacattcctgaacgtcaaacaccggttcgccaaggcggtagctgacgtactgcagctcggaattaccgctgtagctctgaatcgggaacacggaacggaaggctgcttccaggccgtactgcccttcaggatcttgctcgataaacttctggaacgagtcaagctggatagaaaggagatatggaatgtccagaacttgtggacgtttaccaaaatccttacgaatacgttttttctcggtataggagtaaaccatagggttcctcagctcgctgacaagtcgacccatctgtccgacgaagggacagtttgtgcaacaccattttgtggaccggaaaattgaatactttccgcaatacctgttgctatcacgcttaaaccatttcattgcgatttacacagagcgagcaccctgtcgcagtatattaagtcgtcgatagaaacaagcattgtcaggacaaccagcagtcaaacagtgtgaaatgctgctgatgccttacagcgcaaaaaggctggtgactaaaaagtcaccagccatcagcctaattgcttaggctgcaaccagaaaagttggcttatttaacttcaacttcagcgccagcttcttccagagattttttcagtgcttctgcgtcgtctttgctcacgccttctttcagcgcagctggagcagattctaccaggtctttagcttctttcagacccaggccagttgcgccacgtactgctttgattacagcaactttgttcgcgccagcagctttcagaattacgtcgaattcagttttttcttcagcagcttcagccgggcccgcagctacagctacagcagcagcagcagaaacaccgaatttttcttccattgcagaaaccagctctacaacgtccattacggacatagctgctactgcttcaatgatttgatctttagtgatagacatttaaattgttcctgaaaatcagaataagtttatacgtaagcaaatgctttataaagataactgcgattaagcagcttctttcgcatcgcgtacagcagccagagtgcgaaccagtttgccagccgcagcttctttcatggttgccatcaggcgtgcaattgcttcttcgtaggtcggcagggttgccaggcgatcgatttgcgatgccgggatcaactcaccttcaaaggctgcagctttgacctcaaattttgcattcgctttcgcgaactctttgaacagacgagcagcagcgcccgggtgttccatagagtatgcaatcagggtcggaccaacaaacgtgtctttcaggcactcgaactgagtaccttcaactacgcgacgcagcagggtgttacgaacaacacgcatgtatacgccagcttcacgacctgctttacgcagttcagtcattttgtctacagtaacgccacgggaatccgcaactactgcagacagcgcgcctttggctacttcgctgacttcagcaacaatcgcttgtttgtcttgaagatttaaagccattagctttgctcctggatgtttgccggaactcatgttccggaactcacttcactcgacccaacgggaagagcgtcttaatacggtgagcagaaacaagccagagtatttaaaataatcttagcgttctgtcaccgtctacgcaggggattaagtttcttgcgaaacacctgcggtcttcgacggaggcctggataggccaggctccaacgaacaattcttttagccgctaacttttgttagcaaacgtgggggtaagattgtagacaaaatcaccgcccacgtaaaggcattagtttgcagcagcgctcaggccagcctggtcaactgcaacacctgcacccatggtggtggagatgctaactttcttgatgtacacgcctttcgcctgagttggttttgcttttttcagcgcaaccagcagagcttccaggttttctttcagtttgtcagcgtcaaagtccactttaccgatggtggtgtggatgatgccgtttttgtcgttacggtaacgaacctgacctgctttagcgttcttaaccgcttcagcaacgttaggcgttacagtacccactttcgggtttggcatcaggccgcgtggacccagaacctggcccagctggccaacaacgcgcattgcatctggagaagcaataacaacgtcaaagttcatttcgcctttcttgatctgatcagccagatcttccatacctaccagttcagcgccggcagctttagcagcttcagcgtttgcaccctgagcaaatacagctacgcgtacggaacggccagtaccgtgtggcagtacagttgcgccacgaacgttctgatcggatttacgagcgtcgatgcccaggttaacggcaacgtcaacgctttcaacgaacttagcagttgccagttctttcagcagagcgatagcttcgttgatgtcgtactgtttggtcgcatcaactttgtcacggatcacggacatgcgcttggtcagtttagccatttcttagtcctccactaccaggcccatggaacgtgcagtaccttcgatggagcgagtcatcgcttcaatgtcggaaccagtcatgtcggcagctttggtctgcgcgatttcctgcaactgagcgcgggaaattttacccactttgtctttgttcggcttaccggaaccagacttgatgcccgctgctttcttcagcagaactgctgctggaggggttttggtaacgaaagtgaaagaacggtcagcgtaaacagtgattacaactgggattggcagacctttttccatggattcagttttggcgttgaacgctttacagaattccatgatgttcacaccctgctgacccagagctggaccaactggtggacttgggttcgccatacctgctgcaacctgcagcttgacgtaggcttgtactttcttagccattctaaaatcctctgattgggtaataacgcctcggagaggctccccgtgaataaaattcgttttacgggccggggcccataaaaacaaaaggcgcgaaattgtattccaatctcgcgccctgtgcaacgattaaatcgtcgcttttttgatcgctgcttaggctttttctacctgagcaaagtccagctctaccggggtcgcacgaccaaagatagaaacggaaactttcaggcgggacttctcgtagtccacttcttcgacgacgccattgaagtcagcaaacggaccgtcgttaacacgaaccatctcacccggttcaaacagcgttttcggacgcggtttatcaccaacctgctggaggcggttcataatcgcatcaacttctttgtcgctgattggcgccggacggtcagatgtgccgccgataaagcccatcacgcgtggtacgctgcgcaccaggtgccagctcgcgtcgttcatcaccatctgaaccagcacgtaacccgggaagaatttacgctcgcttttgcgacgttggccgccacggatctcaaccacttcttcggtcggaaccataacttcgccaaataactcttccatattgtgtaatttgatatgctcacgcagcgacgtagctacgcggccttcaaaaccggaaaacgcctgaacgacgtaccagcgctttttaggggcttcagacatctcagaacctcaggccagtgataaaggataccaggcgaaccagaataccatccagtccccacaggatcagtgacattacagcggttaccgccgctacaatcagcgtggtgtgcaatgtttcctggcgagtcggccaaatgaccttgcggacttcggtacgcgcttcgcgggcaaacgcaacggtcgctttgcctttcgtcgtcaacagcgcgacaccacccgccgcagcaatcagaattaccactgcaagcgcgcgtagcggcagcatcatgtcacgataaagatagttgccgacaatcgccacaatcagcagcacggctacaactacccatttcatcgcttccaggccgcgcccgctcccttgagcttcggtattcgcactcataaaccaacctgtcagaagtattctacaaacattttcaccccgcgtgtgcgaggcaaaccaatcgaaatgctattcgcttttcgtattatacgctctccgcagagcctgtctcagcaatgattatgacaaaattaatcactgatgagccaggttctgatgtgaaagcgtgcaaaaagggcatcaaatgatgcccttttattgcgcattgcgtcaaatgttatcagcgattagccgnnnnnnnnnnnnnnnnnnnnnnnnnnnnnnnnnnnnnnnnnnnnnnnnnnnnnnnnnnnnnnnnnnnnnnnnnnnnnnnnnnnnnnnnnnnnnnnnnnnnnnnnnnnnnnnnnnnnnnnnnnnnnnnnnnnnnnnnnnnnnnnnnnnnnnnnnnnnnnnnnnnnnnnnnnnnnnnnnnnnnnnnnnnnnnnnnnnnnnnnnnnnnnnnnnnnnnnnnnnnnnnnnnnnnnnnnnnnnnnnnnnnnnnnnnnnnnnnnnnnnnnnnnnnnnnnnnnnnnnnnnnnnnnnnnnnnnnnnnnnnnnnnnnnnnnnnnnnnnnnnnnnnnnnnnnnnnnnnnnnnnnnnnnnnnnnnnnnnnnnnnnnnnnnnnnnnnnnnnnnnnnnnnnnnnnnnnnnnnnnnnnnnnnnnnnnnnnnnnnnnnnnnnnnnnnnnnnnnnnnnnnnnnnnnnnnnnnnnnnnnnnnnnnnnnnnnnnnnnnnnnnnnnnnnnnnnnnnnnnnnnnnnnnnnnnnnnnnnnnnnnnnnnnnnnnnnnnnnnnnnnnnnnnnnnnnnnnnnnnnnnnnnnnnnnnnnnnnnnnnnnnnnnnnnnnnnnnnnnnnnnnnnnnnnnnnnnnnnnnnnnnnnnnnnnnnnnnnnnnnnnnnnnnnnnnnnnnnnnnnnnnnnnnnnnnnnnnnnnnnnnnnnnnnnnnnnnnnnnnnnnnnnnnnnnnnnnnnnnnnnnnnnnnnnnnnnnnnnnnnnnnnnnnnnnnagtgattgcagcggtcagcgttgttttaccatggtcaacgtggccgatagtaccgacgttaacgtgcggttttgtacgttcaaacttttctttagacatcgattgtccctctaagacacggataaatcggtgatatcaccacatcaaccaggcgaaaatgcctgaactgttgaatacatttacattgaaacagagagaaagggagggagaagtgaagtggtgctgatacccagagtcgaactggggacctcacccttaccaagggtgcgctctaccaactgagccatatcagcacgtattggagcgggcagcgggaatcgaacccgcatcatcagcttggaaggctgaggtaatagccattatacgatgcccgcatcctgaaactcggctacccagttctttctgtaacaaaaaaagagatttctctcttttctgttcgagctggtcaatttttccaaccagctccggcggcgttgtcgctgccagaaagtggtggtgggggaaggattcgaaccttcgaagtctgtgacggcagatttacagtctgctccctttggccgctcgggaaccccaccggacttgatggtgccgactaccggaatcgaactggtgacctactgattacaagtcagttgctctacctactgagctaagtcggcatcaagtagcgcgcattctatggagacctgcgcagtcatgcaactaaaaaattgcataaaacgttctttcgctcacattttattcgaaaccagggctaaccgctgtaaattcatccgctcacggttaaaaattcaacatgaacgcctgatttcggcacgctatagccctaggtgatgcctgcccggttaagcatcgctttcccatattttttcttattattcctctcatctggtgttaacctcctgcccattgtccaaaattaactatgtgatgagcccgcacccgccgtttcgtgatggttcacagaagcatgcttatgagcaaaaaagagcaaacgttaatgacgccctatcttcagtttaaccgtagccagtgggcagccctgcgtgactccgtccctatgacactgacggaaggtgaaatcgcacggctaaaagggataaacgaagatctctccctggaagaggtggcagaaatctatctccccctctctcgcttgcttaacttctatatcagctccaatttgcgtcgtcaggccgtactggaacagttcctcggcacgaacggtcaacgtattccttatatcatcagtattgcgggcagcgtggcagtgggtaaaagtaccaccgcgcgcgtgctacaggcgctgctgagccgctggccggaacaccgcagcgtggagctgatcaccaccgacggcttcctgcatcccaacgaggtgttgaaagaacgcggcctgatgaaaaagaagggcttcccgctctcttatgatatgcaccgcctggtaaagtttgtttcagatctaaaatcgggcgtacctcacgttaccgcgccggtttactcgcatctgatctacgaccgcatcccggatggcgacaaaacggttgtgcagcccgacatcctgattctggaaggcttaaacgtcctgcaaagcgggatggattatcctcacgatccgcatcatgtgtttgtctctgactttgtcgatttctcaatttatgtcgatgcgccggaagatttgctgcaacgctggtatatcaaccgcttcctgaagttccgcgaaggcgcgttcaccgacccggattcctacttccacaactacgcccagctctctgaagaagaggctatcagcgtggcgaccgggctgtggaatgagatcaactacgtcaacctcaaagagaacatcctgccgacgcgcgaacgcgcaagcctgatcctcaccaagagtgagaaacacgccgtcgaccagattcgtttacggaagtagatctcagacgtaaaaaaaacnnnnnnnnnnnnnnnnnnnnnnnnnnnnnnnnnnnnnnnnnnnnnnnnnnnnnnnnnnnnnnnnnnnnnnnnnnnnnnnnnnnnnnnnnnnnnnnnnnnnnnnnnnnnnnnnnnnnnnnnnnnnnnnnnnnnnnnnnnnnnnnnnnnnnnnnnnnnnnnnnnnnnnnnnnnnnnnnnnnnnnnnnnnnnnnnnnnnnnnnnnnnnnnnnnnnnnnnnnnnnnnnnnnnnnnnnnnnnnnnnnnnnnnnnnnnnnnnnnnnnnnnnnnnnnnnnnnnnnnnnnnnnnnnnnnnnnnnnnnnnnnnnnnnnnnnnnnnnnnnnnnnnnnnnnnnnnnnnnnnnnnnnnnnnnnnnnnnnnnnnnnnnnnnnnnnnnnnnnnnnnnnnnnnnnnnnnnnnnnnnnnnnnnnnnnnnnnnnnnnnnnnnnnnnnnnnnnnnnnnnnnnnnnnnnnnnnnnnnnnnnnnnnnnnnnnnnnnnnnnnnnnnnnnnnnnnnnnnnnnnnnnnnnnnnnnnnnnnnnnnnnnnnnnnnnnnnnnnnnnnnnnnnnnnnnnnnnnnnnnnnnnnnnnnnnnnnnnnnnnnnnnnnnnnnnnnnnnnnnnnnnnnnnnnnnnnnnnnnnnnnnnnnnnnnnnnnnnnnnnnntttatgcctgcggctttttcgccgttttcatcctgatcgactgcgaagcaggcaaccagctgtccgccataatccttcagctgtggctgcaactgcgtgcacggaccgaagcggcgacggcagcgggcgttgaacgcacatcccggcggcgggttaagtgggcttggcaactcgccggtcagcttaatgcgctcccggcggtcatccgggttcagtctcggcgttgcagacagcagcgcctgcgtatacggatgacgcgggttagtaaagatctgatctttcgtccccttctccacgcagcgtcccagatacatcaccatcacctcatcggcaatgtgctcaaccacggacaggtcatgggagatgaagacgtacgacagtcccagatcctgctgtaaatccatcatcaggttaagcacctgcgcacgaacggacacgtcaagcgctgagaccggctcatcggcaatcaccacgtccgggtcaagcatcagcccacgggcgatggcaatacgctgacgctgaccgccagagaacatatgcgggtagcgatcgtaatgctcggttttaagccccaccttcgccatcatcgccagcgctttttcacgacgctgctctttgctcagattgctgttaatcagcagcggctcttccagaatctgccccacttttttacgcgggtttaaagaaccgtacgggttctggaacacaatctggattttttgacgacgcagcttctgcgcctgcggatcgtgcttgagcagatcctggccctgatagtaaagctcgccgccggttggcgtttcgatcatcgtcagcagacggcccagcgtggattttccacagcccgactccccgacgaccgccagcgttttaccgcgttcaaggctgaaggagacgccgtccagcgcttttaccaggcgctcgggggcaaaaatccccttcttcaccgggtaatgttttttcaggtcgatagcctgcaacagcggctgttgcgtggtggcctcgtgcgtactcatagtgttggcctcccggcatcatcgagtgggtagtggcattttgactgccgaccatcggccagcagattcagctctggctcctcggcgcggcatttatccgtcgcatacgggcagcgcggattcagcaggcagccctgcggacggtcatatttacccggaaccacacccggcagtgacgccagacgcgctttgtcctgggcaaactccggcagcgcgcgcagtaacgcctgcgtatacgggtgacgcggcgcgcggaagatatcatgcgaacttccggtctccaccacctgacccgcgtacatcacgatgattttgtgtgccgcttccgccaccagcgccaggtcgtgcgtaatcagcaccagcgccatattctctttctgctgcaactccagcagcagctcgatgatttgcgcctggatggtcacgtccagcgcggtagttggttcatccgcaatcagcagttttggtcgacaggcaatcgccatggcgatcatcacgcgctggctcatgccgccggaaagctgatgcgggtaaacgtccaaacgcgatgctgggtcaggtatccccaccaggttcagcagatcgatagcacgctggcgacgggttttcttgttgccgccctgatgcaccttaatggcttccataatctggaaaccgacggtgtagcatgggttcaggctggtcatggggtcctggaagatcatcgccacttccgcgcccaccagctggcggcgctgtttttcggaaatgcgcttcagatcctgaccgttgaactccagattttccgccatcacgcggccggggtagtcaatcagccccataatcgcaagcgaactcactgacttaccggagcccgactctcctacaatcccgaccacttcgccctgattaacgctgtagctgatgcggtccacggcgcgaaacggtgtgccttcgtcgccaaagtgcacggataatttatctacatttaataacgccatctcgtgcctcttactgcttcagtttgggatcaagtgcatcacgcagaccgtcacccatcaggttaaatgccagcaccgtcagcagaatcgccagacccgggaaggtgacgacccaccaggcgctttgcgcgaactgcaacacgtcggagagcatggtgccccactccggtgttggcggctgcgcacccatgccaaggaagccaagagcggccatatcaagaatggcgttagagaaaccgagcgacgcctgaacaatcagcggcgcaaggcagtttgggaagatattgataaacatctgacgcatagcaccggcacccgccacgcgagaggcggtaacgtagtcccggttcacttccaccagcaccgccgcacgggtcagacgcacgtaatgcggtagcgcaacaaacgtcagcgcaagcgcggcgttaccaatcgacggaccaaagatcgccaccagcaccagcgccagcagcaggcttggcaatgccagcataatgtcgacgacgcgcatgatgatgttatcaacaatgccgccgaagtagcctgccaccaggccgagtacgatccccatgatcagcgacagtacgacaacgaggcagccaaccagcagcgacaggcgtgcgccgtacatcaggcgcgacagcacatcgcggcccacgtcgtcggtgcccagcaggtgcgtcaggcttccgccgtcctgccatgcaggaggtgccagcagcgcatcgcggaactgatcagccgggttatacggcgcaaggaagttcgcaaacaccgcaatcaggatcatgatggaaacatacaccagcccgacgaccgcgcctttgttgcgcttgaagtagtgccagaactcctgcatcggcgtcattggcaccggtgcggtgaccactttattttgagtaacttgtgacatgatggccccttacttcttatgacgaatacgcgggttcaccacgccgtacagcaaatcgaccagcaggttgacgaggataatcatcgtcgcgaccagcagtacaccgccctgcacaaccggatagtcacggcgttgcagcgcatcaatcagccagcgtccaagacccggccaggagaagatggtttcggtcaggatcgcccccgccagcagcgtaccgacctgcaaaccgataacggttaccaccggcagcatagcgttacgcagggcatgaatgatgatgacgcgcatacgggtcaggcctttagcgcgggcagtacgaatataatcctcgcccagcacttccagcatggaggaacgggtcatacgcacgatcaccgccagagggatggtgcccagcaccattgcaggcaggatcatgtgcgcaaccgcatcaatgaagttgccctcttcgccccagatcgccgtatcaatcagcataaagccggttaacgggttggtgtcgtcaaggaaaaccatgtcgctgacgcgtccggagaccggcgtcaggttccactgcaccgagaccagcatgatcagcatcatgccccaccagaagataggcatggagtagccggtcagtgccagaccaacagcagtgtggtcgaaaatagagccacgcttaacggcagccagtacgccaacggggatccctaccgcggtcgcgaagatcatggcgcagataccgagttccagcgtcgctttaaagcgcggcacgaactcgtcccacaccggaagacggcttttcagtgaaatccctaaatcgccgtgcaacacaccccagatatagtggagatactgctgccacatcggcttatcaaggccgagttcagccagcagttgcgcatgacgttcaggggagataccacgctcgcctgccataatcattaccgggtcacccgggatcatatggacgaaggcaaaagtgagaagggtgataccgataaacgtcgggataaccagtcccagacgtcggaggatgaactgcaacataacccggattctctctgatgacgcacgcccagtggcgtgacgtctgtattgctcacaaatgtaaattccctctccctgtgggagagggttaggatgaggggatgcatgcacgnnnnnnnnnnnnnnnnnnnnnnnnnnnnnnnnnnnnnnnnnnnnnnnnnnnnnnnnnnnnnnnnnnnnnnnnnnnnnnnnnnnnnnnnnnnnnnnnnnnnnnnnnnnnnnnnnnnnnnnnnnnnnnnnnnnnnnnnnnnnnnnnnnnnnnnnnnnnnnnnnnnnnnnnnnnnnnnnnnnnnnnnnnnnnnnnnnnnnnnnnnnnnnnnnnnnnnnnnnnnnnnnnnnnnnnnnnnnnnnnnnnnnnnnnnnnnnnnnnnnnnnnnnnnnnnnnnnnnnnnnnnnnnnnnnnnnnnnnnnnnnnnnnnnnnnnnnnnnnnnnnnnnnnnnnnnnnnnnnnnnnnnnnnnnnnnnnnnnnnnnnnnnnnnnnnnnnnnnnnnnnnnnnnnntgggaggagggttaggatgagggatgcatgcacgcccctcacccctgccctctcccacagggagagggagaacaccctacttattattcaacagacacgttttcgaagtggtgtttgcccagtggatcgaccacgtagcccttcacttctttacgcactggctcgtacacggtggagtgagcaacaatcagcgccggagcctgatcgtgcatgacaacctgagcttgcttgtacagttcaatacgtttgttgtgatcgtcggtcgcacgcgccggctggatcagatcttcaaatggcttgtagcaccagcgagaatagtttgaaccgtctttcgctgccgcacagctgaacagggtcgcgaagaagttgtccggatccccgttgtcgccggtccagcccatcatgaccgcctggtgttcgcccgctttagcgcgcttcaggtactcgccccactcgtaggtcacaattttggcctgtacgccaatcttcgcccagtcagcctgaaccatttccgccatacgacgtgcgttcgggttgtaaggacgctgtaccggcatcgcccacagctcgacggtgaagcctttgtcctggcccgcttctttcagcagcgctttcgctttctcagggtcgtaggtgtagtccttaatgtcgtcgttataaccccacatggttggtgggatcaggttcttggccgcaacgcccgcgccctggtaaacggctttgatgatcgcttctttgttcaccgcgtaagtcagcgcctgacgcactttcacgtcatcgaacggtttcttctcggtgttgaaggagagataacccacgttcaggcccgcctgctccagcaggttgatatttttgtcctgcttcatgcgcgcgatgtcagccgggtttggatacggcatcacctgacattcgtttttctgcaattttgcgtaacgcacggatgcgtcaggcgtgatggagaagaccagacggtcgatctgcggcttggtgccccagtagcccgggaaggctttatacagaatacgggaatctttctggtactgaagcagctggaacgggccggtaccgattgggttcaggtccactttttccggcgtgccggctttcagcatgttgtcagcgtactctttagagagaatcgaggcgaagtccatcgccaggtcagccaggaatggcgcttccggacgcgtcagcacaaactgaacggttttatcgtccacttttttcacttcagcgatcaggtctggcagacccattccttcgaagtattcatagctgccgccagacactttatggtacgggttctgggcatttttctgacggtcgaaggagaacacaacgtcgtcggcgttaaagtcgcgcgtaggtttaaattctttgctgtcctgccacttcacgccctggcgcaggtggaaggtataggttttaccgtcttcgctgatatcccacttttcagccaggccaggaattacttccgtggtgccggttttaaattcaaccagacggttatagatcggtacagagcttgcgtcgtaagtcgtaccagaggtaaagagctgtgggttaaagccttccggagagccttcagaacagtaaaccagggtttttgcctgtacgcttgctgcaacggtcatggccaccaggctcagaccaagcttcagcatccctgacttcttcaaggaaatactcattattgtgctccaatgtgatgttttgctttgttgtgttacgccgcctgacctttatttattttttacccggtccggtcggtgatgcccgaaggcgttaaaagggatagagaatcctttcagaagagcgtttgagttgcagcgcagatcctccctgaaatgcccctcgtgccctacaatctgtcaacagaatgtgaaaacgtcaatacaggtggcggggatttacgtggagtgtgagaaaccgcaaacaaagattaaaaaaaccctgaccgtgagttttcagcagagaaatttatgctactcgccatgatgcagcacaattatcttcatatttcgcaacactcagtgattaagttttattcagaatgggtaaattttcttacagaatggtgattatctgagcactaaataccgcgaacgttaaaacgcacagcgaaaaatgctgaggttatccataagcaacgcgaaaaaagatcaaactatatataaaaaaatacaatggattatgtcacaaaaccgcaagcaggcagggggaagcagggctaaggggtattttgaggactcgtgcggggtaacgcgttaatgcaaaaagggctaaccttgcggttagccctttttagaatgtggtcggcgagagaggattcgaacctccgacccactggtcccaaaccagttgcgctaccaagctgcgctactcgccgaatgcggagcgcatcttactgctgaggtgcgcccccgtcaatcccttattttcaaaaagccattcaactggcgatattctcgccagaccagctactgcgcggcttttgtggtgttatcagggagtttacaccagttgttgttttcgttaatcccaccgttcggtgaggtatagccgagacaacccataatggtgtcgtacagctcaacgtgacggcgcggtaccttgatctctgcctgctgtttcagatgggcaaacattttggctttgtccgggttttccaggtacttatccgacatccacatgatcatcggcacgcggaactgctcaggcggggccagcttacgcggcgtgccgtgtaaatgctctttctcgttgatggactcgccgtggtcggccgcgtaaatcacaatcgctttcttatcgcgaagctggtcgatcacccggctgaggaaggtatccacatacagaatcgagttatcataggcattgatcagctcctgcttgctacagttcttgttaatgccgacgcactcaggcgtccatttggcgaaatcgcgcgtgtaacgctgatagtagctgtagtgtgaacctttggtatgcagaacaataaggtgcttaccctgcggatggtttttcagcgactgttccatctcagagagcagcagcatatcatcaacgttctttccgcggttacgcggctcggcgccaatctgctcgcggtaggcgatgttatccgccatggtgttggtgtagaaccacatctcactttgcatggcgaacagatcggagctaaatccaagctgcttcagaacagcaaacacgttttgctctttgagagtgcgctgaggattatcactcgcaccgccctcacgaacaaacatacagcgcaacgagagcttcgtggcggtatcgcaggagtagccgcggtatgccaccaggttcttttcctgcgccagtttcggggtggtatcgcggtcataaccgagaatacccatatgatcccagcgcgtcgtttcgccgataacgaagaccacgtaagtatcatccagtccgtcagccggagcctggtaggtgaactttttggttgggttaatcagcgatttcacatcgctggattcgtccgcctgagcccaggcatagagacctaacgccgacagccagttagacggcagatacgagttagccaccacgccgccgtagcttggcatatctacgcctgtcgctttttcgatccgcttttgctgtttttccatcaggcgaataggcgcccataccagcagacccgccagaagaacgacggcgacgttgcggatgcgttgcccacgggtacgcagctggcgtaacagggtatagcgacaggtattactccagataaagaagagcgggatcaggcaggtcaaaatcgtccacatgatgaacccttgccccaccacctctttcgagaggtcgatgtccgtggtcatcaccgaggccacaataccgtagccaatgaccacattcatgaatgtcatgtaatagcttgcggcggcagagataatcaccaccagcgaggccagaacctgccatgtacgtctgccaaaaagcgagagcagacgtagcaggaagaaggttgccagaattgagccaaacacttcaatcgcggcgaaaatcccgtttcttacggtgaggtgttcaaaataaccttccactcttctgaacagcaccgcgccattcagaaacaaaccgatatagacagccagcatcagacacaatctttgctgggtaagagacctgatatatttcatgcaaacaaccctgggggaaggggtataaagacccgccgaatctcattgagaaagcagacagagtaagtaggtgcgagataaaccgttatcagaaacgtctacaagcgcgataagtagaccacagcgaggaagaaaagtggcagcagagaatgtgaatcgatgaaaatttttacaaaataacaagtccggaagtgatatggcgataaaaaaagaggccctgcggcccctttttatcgaatcatgcatgcgcttctttatagacctcgcgttgcggctgacgaatcgtggtggacagcgccagtgaaataatcagcaaggcaaatatcacgcagaatgtcacgtagaagccaccaaacagcgaggcaatcagcgatccgcaaatactgccgataccgaagccgagataaatcacaccgtagtttttcgccagattgttcagcccgaagaactcgctcaccagcgacgggaagacggtaatggtgccgccaaagttaaaggctacgcaggctatcgccgcaaagaatgtcgcttcgttcagcggagcgaacagcagcgccgccatccccaccagggatatcacctgccccagcgtaatcacgcggatcctggcgattttgtcagacaggatacccagtaccagacgacccgagaggttagcaatggagatgaccgttaccgcgttcgccgccgtcgccgcgtccagtttcaccattccctgcgcgatatctttcgccacgccgatgacatacagaccgctcatgcaggccgtcaggaacatcaccgccagcatccagtactgcggtttacgcatggactgtgcaagggtgaaatcattttccaccacaccgttaacggttttcacttcctgctgcggcgcgtctttcatcagcgttgcgccgaagaggatcatcaccagcacaatcacgccccagatcataaaggttttctcaagccccaccgaggccagcagatgcgcatcgatgaatttgaagccgaggctgcccaggccatatgaaccgatggcaaacgcggagataagccctttacgctccgggaaccacttcacgcagttagacagcgtcagcaggtaacctgcgccgtccgccagccccaccagcaccccggcgctcagccacagcatcatcaggttgtcggaatatgccgtcaggaagaagcccacgcccagcaagatcccggaggccatggttacacgcttcacgccgaagcgctcctgaagtttgcccgccacggaagaggaaattgctaacccaagactcagcaagccgaaggagaacgccacctggcttatcggcgcgccgatcttatcagacagggcgctgttaaacaggctccaggtatagaccgatcccagtgcgaactgggtaacgatggtgccgaatagcgtcagccaacgcgtgcggttataagttgatgtgttcatggcagtgtcctgcaagataaattaaggaaattcgctgaggacacgataaacaaaaccttagtagcgctgggggaaaatggcatgaaatgcaggagaagcggaatgaaatgcctggaagcgggaatgaatgaccttgccggagaagaaaaagctcaaaggtgagcgatcactatcgctacagtccctgccgttattgtattaaatatgttaccgcagcgtttaaaaaagtgacaaccctttaaaatttggcgctcaatcccagcgtatataaatattcttcttcagtttgctggttatagctgatcttcgcccaggggtgtaaatcaccatactgcgtatcgacacgccaccccaatgagttcacgctggcatgccagagtggatcggtaagcgactgcgtggtggttgtatcctcaaacgcattcactggtgcggagggagcgccatcagtgcgccacgccattacgggcccggtggtgaaatgtcccgccacgggaaaattccagccaacgctcagaacggtttccgcatctgaaccggatgggtcgttcagggtaaaccccgcagcattctgcgtgcggttaatacgctccgcgagaatatcttcataacgaggttggtgatcggcgtcccatgtatagcgttccatcgtattactttgagcatctgaaacgatatattcctgttgccacgcaaaagcggtgttacaaaaaagcaggcagactgaaacacccaccaggccagaagcagcatggcgaccactgattttttttatcatcatcaaagcgactccagaaagagccgagttcggcgatatatgtcattgttcgaagaggtattagggcgtatagccctgtattaactattgtctctttagcagacacgtcaagccgggcagattgaaatttttgcgtttaccgtatcaggaagggagatgacctatgcaacgttgcggctgggtaagccaggatcagctttatatcgattatcacgacaaggaatggggcgtaccggaaaccgacggtaaaaaactgtttgaaatgatttgccttgaaggccagcaggccggactgtcgtggatcaccgttctgaaaaagcgtgagaactaccgtaaagccttccaccagttcgatccggtagcggttgccgccatgaacgacgaagacgtggaaaggctggttctggataccggtatcatccgccatcgcggtaaaattcaggccattattggtaacgcgcgtgcttatctggcgatggagcaaaacggcgaacccttctcagcattcgtctggtcgtttgtggataacgagccgaaggtgacgcaggccgccacgcttgcagagatcccaacgtcgacccccgcctcagatgccctgtcgaaagcgctgaaaaaacgcggctttaagtttgtgggcaccaccatctgttactcctttatgcaggcctgcgggctggtcaatgaccacattacgggctgcttctgccatccggagggccaccatgatccgcaaatggcaaagtgaggacaccgctccgcttttgagtctgtggctggagagcaccaccgaggcgcatccgtttatcgacgcaagttactggcaagcgaatgaagcggtagtgcgggatgaataccttcccgccgccgagacctgggtctgggaagaaaacggtaccctgtgcggttttatcagcgtcatgcagttccagttcgtgggggcgttgtttatcgccccggcgttcatcggaaaggggatcgggcgtgcgctgctgaaccacgttcagcagcactatccgtatttaactctggaggtgtatcagaaaaacgtgcgggcggtgaatttctatcatgctcagggttttcgcatcgaagacagtgcctggcaggatgatacccaacacccgacgtggatcatgagctggcaggcggatcaaacgccgtaagggtaagcgccggcccctcatatttctccacccatgccagcgccgtattccccgcgcagccattccccagcttcgagctggggagatctttggtcagcacgtttacggcgccgttcttacaaataccgccctcgtccagcgccagatccggccatgcgccctgatgaatgcagaaaacgccagggcggatcccgtcactcaccatggcgcctgccagcacctgcccgcgcgcgttccagacccgaacgaggtcgccgtggttaatcccccgcgcctttgcgtcatcgctgttcagcgcaatcggctcacgacccgccaccgcatactgctcgcgcaaagccgaatagttgagctggctgtgcaaacgatgggcgggatgggcagacagcagctgaagctgccccggctgcgcattgccatgccattcgtccggctccagccacgccggatgtggcggacagtccgcgtagccaaagctggcgatgcgttcgctgtagatcacaatcttcccgctttcggtttttagcgggtgattctccggatcgcgacggaagtcagcaaagcgcacaaaccgcgcattctgctcgctttccggcatttcgaagagttgattcgcctcccagaactcagcgaatggcggcagcgtcacgccctgcgcagccccgcgctggctggcaatctggtaaaacgtttccagccattgcagatcggttttgccctcggtgaaacgctcccgaccgcccgcttcccacatttcactcaggtcggcaaagacatcaaaatcatcccgcgcttcatcccggggagccacgacgcgcttcatcggcaccatatgctgattactgtaatcccccgtcatggtgagatcgttacgctcgaacgaggtcgtggcgggcaaaacgatatcggcatgtttcgctgacgcggtccagaagcactccgagatcaccaccagctccggtttctgccaggcgcggatcaggcggttagtatcctggtgatgggtgaagttggccccacccgcccaccagacaaacttaatatccgggaaatgccgatcctggccgttgtgctgataaaacccgcctgggttctccagggcttcaacaatgcgtgccaccggaattttatctaccgcgtccacgccaccctgcactgagccctgcatggaggccagcaccgcggcttttcgcgtcgggttgccgccgttagcaaagtgataggaaagcccaaaaccgccgccgggtgtgccaatctgcccgagcatcgcggcgagcgtcaccagcatccagtgcttctgctcgccaaactgctggcgctgcatcccccagccggacatgagcatcgtgacacggctatggaataacgtcgccagttcgcggattttaacggcatcaacgccacaaatcgccgcagcccactctgcggttttggcgataccgtcggtttgtcccgtcaggtagtcggcaaatttatcgaagcccgtggtgcagcgcgccagaaattccgtatcgtgccagccgttctccaccagggtgtgggcgatgcccagcatcatcgccacgtcggtgcccatatgcggcgcgatccactcggcgctgtcgccgaagaaatccagcgtttcagaacgcatcggatcgatacagatgatgcgcttgccgcttttgcgcagcgcatcaaagtaggaaacgccctgctcgtcggacgcattccaggcaattttcagggtattgagcgggttggcgctccagagcaccaccacctccgcatgctccagcaccagcggccagctggtctgctgctgataaacctcattcccgcccacgacatacggcatgattgcctgcgccgcgccggtcgagtaatcgcccagatggccggtgtatcctccggccaggctcatatagcgttgcagcagggttgcggccttatgcagcacgccgttcgagcgccagccataggagccggcaaaaatggacgacgggccatagctgtcgcgaatgcgtttatgctgggtatggatcagcgccagcgcgtcgtcccagctcacgcgtacgaactcatcctgcccacgaataccctgcggcttatccggtgacgccagaaagcctttacgcaccatcggccagcggacgcgggttttactgtgtacctgatcgcgaacgacggtctgtaaagagttgagatggcgcgaaggcaaagccccgcgagacgacagcacagtgtcgccatcggtttcgaccagcatcggcccccagtgggcggcggtcagaatggtttttgttgaggtgctcaaagcgtgcgctcctggttgcgtgcaggtgtttcggcctttcattgaggcagtttatcgtttgtgacaaatttcagagttatacactgaattttctccgtatccggacgtcataatccactgccacgtccatcgtggcaaagaataaaaaggattaaggaaataagatgaaaaaacgcgtactcgttattgccgctctggtgagcggcgcactggctgtttctggctgcacaaccaacccttacaccggtgaacgcgaagcgggcaaatccggcattggcgcgggtattggttccctggtgggcgctggcgttggcgcactctcctcctccaagaaagatcgcggcaaaggtgcgctgattggcgcagcggcaggcgcagccctgggcggcggcgtgggttattacatggacgtgcaggaagcaaaactgcgtgacaaaatgaaaggtacgggcgtgagcgtgacgcgcagcggtgacaacatcatcctgaacatgccaaacaacgtgacctttgacagcagcagcgcgacgctgaaacccgcaggcgcaaacaccctgaccggcgtggccgcagtgctgaaagagtacaataaaactgccgtgaacgtgattggctacaccgacagcaccggcagccaggatctgaacatgcgtctgtcccagcagcgcgccgattccgtggccagctcgctgatcgcccagggcgtagaagcgaaccgcatccgcaccagcggcatgggtccggctaacccgatcgccagcaacagcacggcggaaggcaaagcgcagaaccgccgcgttgagattacgttaagcccggtgcagtagttaaaagcaaaacggcaaccacgttgccgtttttagtgtttgcgccctctcccgtgggagagggttggggtgaggacatcagaccgcaacctccggtaagcgcagcgccacccggtaaattgcttgattcgccagattttcccgctaaggtattctcactaaattcagggaaatcagcgatgatcaaaccaacccgggccaccatcagcgacgtggcgaaagccgccaaaaccggtaaaaccagcatttcacgctacctcaacggcgagaaacacctactttccgatgcgctgctggcacgaatcgaacaggccattgccgatctcgactaccgtcccagcctgatggcgcgcggcctcaagcggggccgcacccgtctgattggcctcatcatcgccgatatcaccaacccctattccgttaacgtcctcagcggcatcgaagcggcgtgccgtgaaaaaggctttaccccgctggtctgtaacaccaataacgaggttgatcaggagctgcattacctcgatctgctgcgcagctatcaggtggaagggattgtggtgaatgccgtcgggatgcgagaagaggggctaaatcgtctgcaacaatcgtctctgccaatggtgcttattgaccgaaaaatcccggaatttgcctgcgatgtggtcgggctggataacacccaggcggctaccaccgccactgagcacctgattgaacagggcttcgaagccattttattcctgagcgaaccgctgggcatggttaacacccgccgcgaccgcctggcggcatttcgtgccacgctggcgcgatatcccggcgtgatcgccgagaatgccgaaatccccctgcatgaagccgggcagctggataataccctgcgccagttccatacccgccatcggggtatgcgcaaggcggtgatctccgcgaacggggcgctgacgcttcaggttgcccgctcgcttaaacgcattggcctgcactggggcagcgacatcggcttactcggctttgatgaactggagtgggcagaacttgctggcgtaggcatcaccaccctcaaacaacccacctggcagatcggctatgccgcggttgaacaagtggttcgccgcattgaaggcacccgcgacgccgtacgcgagcaggtgttttccggcgaactgatcgttcgcggctctactgcccgttaatttccccttcgtgacagcgatcataaattcagcatcccgatcttttctttggaaccggttccatctagcgtaatactatcgattacgctctggagtcaggaaatgagcaggaaaattatggtggtcaccgccgcgtatggtgcggatcaggtgcgacaggcaggcggtcaacgggcaatacttcccgttattgccggcgcaggagctgatggcgttgaaatccgccgcgagctcttcagcaacgacgagttaatggccctgcctgcgctcggcgagtccattgaactgctgggtttactggcgtgctactccgccccggcccccctgtttatgcccgatggcaccctcaacacggatctcccgcgctaccttagcgaagccagcgccctgaacgcgctgtggcttaaagtctcgctgggtcatttcagcgacaaacagccgcttgaagccctgcgcgcactgctggatgaaagcggcatgacgctggtggtggaaaacgaccagaccgactgcgggcagctcgcgccgatgcagcgcttcaaagccgcctgccgggtaatggcgctgccggtcacgctgacgttcgatatgggcaactggctgtgggttggcgactctccggaagaggctgcacgtcagctggctcccgccgtgagctatattcatgtgaagtccgcagtcccgcataaggcgcagttccgcgccgtcgcgccggatcagaccgattctcgctggcgggatctgcttaatcaactccctgccgatgcgccacgcggtatcgaatttccgctggaagggacggatctcaccgccgtcacccgccattacgtcaacctgctgcgcgaggagtaaaccatgcacaagacgctggatgtcatcaccattggcgaggccatggcgatgtttgtcgccaccgaaacgggcgagctgagcgcagtggagcacttcattaaacgcgtggcaggtgccgagctgaatgttgctaccggacttgcgcggctggggctgaatgtcggctgggtaagccgcgtgggaaatgacagctttggccattttattctcgactcactgaaaaaagagggcattgatgccgcaggcgtgaccctcgacggacgctttgcgacgggctttcagctgaaatctaaagttgaaaatggaaccgatcccatcgtggagtatttccgcaaaggctcagcggcaagccatctctccgtggatgattatcacgccgcgtatttctcctccgcgcgccacctgcacctgagcggcgtggcggcggcgctctcgaccagctcgtacgatttactggatcacgcggcttcggcaatgaaagcacagggcaaaacgatctctttcgatcctaacctgcgcccggtgctgtggaaaagcgaagcggagatggctgagaaactaaaccgactggcgtttcaggcggactgggttctgccgggcataaaagagggaatgatcctcactggcgaaagcacgcccgaaggcattgctgatttttacctcaacagaggggtaaaagccgtggtgctgaaaaccggtgccgacggcgcatggttcaaaactgccgacggtgagcaaggcgctgtcgctgcggtaaaagtcgacaacgtggtcgataccgtgggcgcgggcgatgggtttgccgtcggggtcatcagcgccctgctggagggcaaaccgctgtcgcaggccgtggcgcgaggcaacaaaattggttcgctggcgattcaggtgcagggcgacagcgaaggattaccaacacgagcagagctcggcgtctaaattccctctccctgtgggagagggcctgggtgagggcagcaatccgcaccagataattaagccaccgtgtaccctacagacaacggcggcaacaacctcaacaacagaggcaagcctatgaacagttcgaccaatgcagtaaaacgctggtggtacatcatgccaatcgtgtttatcacgtacagcctggcgtacctggatcgtgccaacttcagtttcgcatccgccgccgggatcaacgaagacctcgggatcaccaaaggggtctcctccctgctgggtgccctcttcttcctgggttatttcttcttccagatccccggcgcgatttacgctgaacgccgcagcgtgcgaaagctcattttcatctgcctgatcttatggggtgcctgtgcgtcgcttactggcgtggtgaataacattcctgctctggcggctattcgctttattctcggcgtggttgaggcggccgtcatgccagcaatgctgatttacatcagcaactggttcacaaaatctgagcgttcacgtgccaatacgttcctgatactcggtaacccggtcaccgtgctgtggatgtcggtggtttccggctacctgatccagtccttcggctggcgcgagatgttcatcatcgaaggggttcccgcgattatctgggccttctgctggtgggtgctggtgaaagataagccagcccaggcaaaatggctttctgaggacgaaaaagccgcgctccaggcgcagctggataaagagcagcaggggctgaaagcggtgcgtaactatagcgaagccttccgctcccggaacgttattctgctgtgcgcacagtattttacctggagtattggcgtgtacggctttgtgctgtggctgccgtcgattatccgcagcggcggtgaaaaccttggcatggtggaagtgggctggctgtcatcggtgccttacctggctgcgaccatcgcgatgattatcgtctcctgggcatcggacaagctgcaaaaccgtaagctgttcgtctggccactgctgctgatcgctgcttttgccttcattggctcctgggccgtgggcgcaaaccacttctgggcttcgtatacgctgctggtgattgcgggtgcggccatgtatgccccgtatggtccgttctttgccatcatcccggaaatgctgccgcgtaacgtcgcagggggcgcgatggcgttgatcaacagtatgggcgcgctgggttcgttctttggctcgtggtttgtgggctatctgaacggcgccaccggcagcccatcggcctcttacatctttatgggggtggcgctttttgcctcggtatggcttactctgattgttaagcctgctaataatcaacagctacccgtcggcgcacgccacgcctgaatccttttaaaatcaacggagattagcatgaagccgtccgtcattttgtacaaagcactgcctgaagacctgcaaaaacgcctggaagaacactttaccgttacccgggtcaagaacctcagcccggaaaccgtggcacagcacgccgacgcgtttgccagcgccgagggcctgctgggttcgagcgaaaaggtggatgcagcgctgctggagaaaatgccgaagcttcgtgctacctcaaccgtttcggtgggatacgacaatttcgacgtggatgcgctaaacgcgcgcaacatcctgctgatgcacacgccgcatgccctgacggagaccgtcgccgacacgctgatggcactggtgctcagtaccgcgcgtcgcgtggtggaagtggccgagcgcgtgaaagcgggcgaatggacgaaaagcattggcccggactggttcggcgtggacgttcatggcaaaacgctggggattgttgggatgggccgcatcggtctggcactggcacagcgcgcgcatttcggcttcaacatgcccatcctgtataacgcacgccgtcaccacactgaagctgaagaacgtttcaatgcccgctactgcgagcttgatacgctgttgcgggaagccgactttgtctgcctgatcctgccgctgacggatgaaacgcgtcatctcatcggcaaagcggcgtttgaaaagatgaagaaatcggccattttcatcaacgcgggtcgtggtccggtggtcgatgagaaggcgctgattgaggcactgcaaaacggtgagatccacgccgccggtctggacgtgtttgaacaggagccgctgccggtggattctccgctactgaccatgccgaacgtcgtcgccctgccccacatcggctctgccactcatgaaacacgctacaatatggcggcgaccgccgtggataatctgattgccgcgctcggcggtaaagtggataagaactgcgttaacccacagatacaacagtagaaacgaaaaaacccgccagaaggcgggtttttgaattttgtgctactgggttggaagcttacaggcttacaacgttaccagctgctgggcctttagcgccgctttcgatggtgaaggaaactttctgaccttcatccagagatttgtagccatcgttctggatagcagagaagtgtacgaacacgtctttagagccatcgtcaggagtgatgaagccgaaacctttatcagcgttgaaccattttaccagaccagtcattttagcagacatagaaattaccttattaacaaatatattgtgccttccggcttgatggattgcgttacagatttttaagcgatgaaggaagggtcactacgaagggtatctatggataacaatctggactgctttactaaactgctttaggtctgtgtaacaaaccgacgaacatagttataccgatgtggtagatgaatgacaagcgttattttcatcaagcataaaaaaaaccccgccgaagcgggggtttttcttattccgtagcagcgaccgctgcgctccatgcctggctaaaggcctgatgctgggacgcgagcggcccgatcagcgcgttatactggctcgcctgctgggaggtcgggaactggataccgttagagacgaagctcacctgcgtaccttgttcactaataaagtcacccacctgaaccagctgctgagtaaagacctgcgccgccggtatcagcggttgcaaggcgtttgacggcttggtcacgactttctcatacacctggtcatagaccggtttgagatcctcgccctgcttcaacgcggaacgcgacgcatcagcctgcattttggcattttgcagctgctggctcagtaccccaagcgcgccatttgactggcgcagcggttcgcgctgggtcatataatcctgtggaacgcggatggcattcacgctatccactaccgggcgaataccggaatccatcgcctggcttacctgctgtgaatagccatacagaatggcgtaatccgacacgaatggaccaaactgttttttctgatccgcagtcagcgttggtaaacgctcgccgctacgcatcactgtattctgtagaaaatcgataaacgctttgcgctgatcgccttctttatcgaaacacccactcaggctaacaaccatcaacaacgccgcaataggcgcaaaccagcgagagcaggactttcctgtcgccattttattactcctttcacccaaaaagcgcacaccggcacacgcgtgcccaacgctgacaaggatagtccaggtcagccttgcaagatagagttttcatgcaaaacgggtattcccgtttttgtactgactatttacaaaaaaatacctgtgcatccctacatatgactaatcaggtaattagcataactatccatatagctgaaacgcgtaaagcgatcgttatcgcacaattaatcacagccgtgacgatcctgtgtctggtttagggactattcttaacaggctctctgatgttcatgatcccgatgtgtgatttatgaggagttctcaatggaattaaaagatcctgagtttgagctgctgagcagcctggaacagattatttttaaagatgtaccgccgacggttaccctgaatcaaaagtccaatccttttagtgaatttgagcgtttacgcaaaggatcgggcctgaaaacagatgaattcgcaagagcgatgggtgtcagcgtagcgatggtgctggagtgggagtcaaaacgtgaaaaacctaccccagccgagctaaagctgatgcgcctgatccaggcaaaccctgaccttcgcaagcagttagcctgataaagtttgtttgcccccgcccttgcgggggcttgtgtttacagactttcacatcgccatcccgtctcttcccacaccagttcatgcgtcagcttcagccctgccagaaaggcttcatcatgcgacaccaccagcagcgcgccggggtaatcggctaaggccgcttctatggcctgaacagaggccagatcaagatggttggtcggctcatccagaagcagcagttgcgttgccgcttcacgccacaatacgcaggccagcgcggccttcaggcgctcgccgccactcagttcggccagtggaagggtcactttctctgcgcccagctgaagctgcgctaaacgggtacgcaacgccccctcttcgagcggcgtattgccgaggctaaggtgtgtcatcaccgactgcgacagatccagccgggacagatgctgatcgagatacgcacacctgacggagaccttacaggttcccgtaacaggggcggtttcgcccaacatcactttcaacagcgtggattttccacagccgttcggcccgcgtagcgccacgcgcatcgggccatccattcgccagtttatcggggggacaggcacgtgcggaagcaccagttcttccagcaccagcacctgttttccttccgggatttcactgcccggcagggtaaacatcaccgcgttatcctcttcaaccctctcgcgtgcctggttgaccgcagcgttcagagcatgattttgatcgctatgctgttttttccaggaaccaatacgctctttcgccgcccctttgtatttgacccgttcaaacgaggcgatgttaaggctgtcgaccgtgcgaagcgttttggctgaacgccgcaggctgtcgtcatgctctttatgcatacgggcgcgggtacgcttgcgttcggtggcagcatgctccagcgcggcgcgggcagccagctgctcagcatcacgctgggttcgatagccagcataattcccaccgtagctgcgcaagcccaatgcgctcagttcaaggatacgcgatacctgggccagcaactcacggtcgtgagaggccaccagcaccccgccctgataccgggaaagctgctcgtagaaccacacgcggccttgcctgtcgaggtggttggtcggttcgtccagcagcaggtagtcagcatctgcggtgaatgcgctgcacagcaaggcacgaatgcgctcgccgccgctcagctctgccgcgcgtttattcgggtcaaaagggggaagttttgcagcgataaaagcctggctcagccgttcagccagatcccagtaaccgtcgagcgtgtcgagatcgtcgggttcataatgaccgctgtcgatgcgcgtgcgcgccgcaaagatcgcgtcgtaaccaagcagtccggcaagcgtggtatccgcagaaatatcctgctgttgcgctacatagacgtgtataccaaagcgctcaatatgaccgctggcgggttcatcaacccctgccagcagacgcagcagccgtgttttaccgctgccgttgcggccaaccagcgcgcacactgacgcatccagggaaagattcagtggaccaaaaaggatatcgcccgtcgcaaactgacaggtgacctgatgcaaaataaaagagggggactgcgcaaaatgagccataagcactcctgaatgaaatnnnnnnnnnnnnnnnnnnnnnnnnnnnnnnnnnnnnnnnnnnnnnnnnnnnnnnnnnnnnnnnnnnnnnnnnnnnnnnnnnnnnnnnnnnnnnnnnnnnnnnnnnnnnnnnnnnnnnnnnnnnnnnnnnnnnnnnnnnnnnnnnnnnnnnnnnnnnnnnnnnnnnnnnnnnnnnnnnnnnnnnnnnnnnnnnnnnnnnnnnnnnnnnnnnnnnnnnnnnnnnnnnnnnnnnnnnnnnnnnnnnnnnnnnnnnnnnnnnnnnnnnnnnnnnnnnnnnnnnnnnnnnnnnnnnnnnnnnnnnnnnnnnnnnnnnnnnnngggggcgctcctgagggcgaaatttaacgggaacaagaataacggcaatgcgccgcccatttcaaggttaaattttcgccaggctaatgcccgagcgtaaaaaacccgccgaagcgggtctctcaatcagataaacgcaaacgcatcgccaaacagacgatcttcccgcgcgtcacgctcgttgcagaacaggtcgcgggcaatttttgccatttcaaagcgaccggcaatatagatatcgtgcccggccagcgtcccgtgatcctgcaataccgcagtcagcaccgtaccgctgcgcccgcgccagccctcttccggctgctcgacaaccggctcaatgcgcaggtttggatgattcacgctcagcgcttccagctcagacagatcgtaaaggtgcttctcttcacggccgccccagtagatggtgatatcgcgattcgggttgcgcgccagcgcggtcagcagaatagagcggacatatgagaagcccgtgccaccggcaatcaggatcagcggacggtcttcgtcttcacgcagccaggcctcgccgtgaggaatatcgaccacgatttcacgctctttcaggatgcggtccatcacggccatcgcgtacaggttaagctcagacgcaccaatatgcagctcaataaattccttctctgctggcgttgaggccatagagaaaggacgcttatcacgctcgtccatcacgaccatcaggtactgaccggcacggaatgagaaggccgcttcaggaaccaaacggacgcgatatacggtgtcggtaatagcatctaccgacgtcactttacagcttaaggttgtcattcgctctctctgtcgggaagtctatagggctaaacggtcttattctgccttaccgttattcattatggccagctcgtcccagatcgcgtcaattcgcgcggtcacggcaggatcttttttgatcgggcgaccccattcacggtcggtttcgccaggccatttgttcgtggcatccagtcccatttttgagccaaggccggaaaccggcgaggcaaagtccaggtaatcaatcggcgtgttttccactaacaccgtatcacgcgccggatccatacgcgtggtgatggcccagatgacgtcattccagtcgcgggcattgacgtcatcatcgcagacaatcacaaacttggtatacataaactggcgcaggaaagaccatacgcccatcatcacgcgcttagcgtgaccggcatactgcttcttcatcgtcaccaccgccaggcgatacgaacacccttccggcggcagataaaaatcaacaatttccgggaactgcttttgcaggatcggcacgaacacttcgttcagcgccacgccaagcaccgccggttcatccggtggacggccggtataggtggagtgatagatggcatcttcacgctgggtaatgtgggtgacggtgaacaccgggaagttatccacttcgttgtaatagccggtgtggtcgccgtacggcccttcgggcgccagctcgccctgttcaatgtaaccttccagcacaatctctgcgctggccggtacttccaggtcattggagatgcacttcaccacttcggttttggtgccgcgcagcagccctgcaaaggcatattcagacagcgtatcaggaacaggcgtcaccgcgcccagaatggttgccggatcggcacccagcgcgacggaaaccgggaagcgttcgcccggatgggccgcgcaccactcctggaaatccagcgccccaccgcgatgggacaaccagcgcatgatgagcttgttcttgccaatcagctgctggcgataaatgccgaggttttggcgctctttatgcggcccacgcgtcacggtgaggccccaggtgatcagcggtgcggcatcttcaggccagcactgcatgatgggaattttggtcagatccaccgcatcgccttccagcactttttgctggcacggcgcaccgcgcaggcgtttggtgggcatgttcagcacctgcttaaactgcggcagcttgtcgaacaggtcgcggaacccttttggcggctccggctctttaagaaaggccagcagtttgcccacttcacgtaacgccgtgacatcttcctgtcccatccccagcgcaacgcggcgaggtgtgccaaacaggttgcacagcaccggcatggcgtagccttttgggttttcaaacagcaacgccgggccgcccgcgcgcaaggtgcggtcagcgatttctgtcatttccagatacggatcaacaggaagcgtaatgcgtttgagttcaccctgcttttccagcagcgccaggaagtcgcgtagatcgtggtatttcatgcagttaatcatggcctctctgtaagcgcttcattatacggcgtaagaccgcgtgatgctgtaattttgttaaattagcgtgaacttccacgacttactctctttttcgccattataatcaccttagcgatcccgccagggttttggtatgcttgcgccccgaacaatgggaagagtgattatgcaggcctggtatttactgtattgcaaacgcgggcaacttcagcgcgcgcaggaacatcttgaacgtcagtctgttaactgcctgacacccgtgatcacgcttgaaaaaatgcagcgtggaagacgcacgaccgtcagtgagcctctgttcccgaattacctgttcgtcgagttcgaccccgaagtgatccacaccacgacgatcagcgccacgcgcggcgtcagccattttgtgcgttttggcgctcatccggcaagagtaccgtcatcggttattcatcagctttctgtctaccagcagcctgaagatattaccgatccggaaaccccttatgccggcgacagcgtggtgatcaccgaaggcgcctttgaaggcttacaggccatcttcgctgagccggacggtgaagcgcgctccatgctgctgctcaacctgctgaacaaagaggtgttgcagagcgttaaaaacaccgatttccgcaaagtttagaactgcacgccgaacagacgacgcacgttatcatcggtttgtgctgccagccactgggcatcttctccgcgccagtgcgccactcgctcagcaatatgccccaggtaggccggttcattacgtcgtgatggcggtttgggctgcatatcccggggcaacagatacggcgcatccgtttccagcagcaaacgatcggccgggataacgggtaacagctcacgcagttccagcccacgacgctcatcgcagacccagccagtgatacccaaatacagcccgcggttcaggcaatccagcgcttcctgacgggagcccgtaaagcagtgcaacaccgcgcccggcagtttctccagccagggttccagtagcgccataaaacgttcatgcgcatcgcgacagtgcataaacaccggcatcaccagctctgctgccagcgcgagctgggcggtaaatgccttctcctgctcttcaggcgtcgagaagttacggttgaaatcaagcccgcattcgccaatggcaaccacttctggcgtttgtgccagacgatgaagcgcctcagcgctttcatgcgtccactggctgctgtcatgaggatgcacgcctgcggtggaccagcagtgttgatagcgttgcgccagctgccgtgcctgctcactctcatgcagattcgttcccgtcagtagcagcccacccacgccggcggcaaaggcgcgcgccaccacctcatcgtggtctttcgcaaactgggcgctggtgaggttaagcccgatatcaaacatacgtatccccatatgacaaccgccctgacgggcggttggttttattctttagtagtctcttcagacggctcgtcttcttcgtcccgggtacgcccctttccgacgtagaaacgagcgaagaacacgccgacttcaaacaggcagtacataggtatcgccagtaaggtttgcgagaagacgtccggtggcgttaacagcatacctacgacaaatgcccccaccaggatgtacgggcgcttcttacgcagatcgtcaggcgtggtcacccccacccagcagagcaggacaattgctacgggcacctcgaaggcgacaccaaaggccataaacagcgccatcacgaagctgaggtagctggcgatgtccgtcgacacctgtaccccttccggtgcggtatgcgtcaggaagccgaaggccagcgggaagacaacgaagtaggcgaacgccatgccgatataaaacagcagcgaactggacaccagcagcggaataaccagcttgcgttcatgcttgtacagcgcgggcgccacaaatgcccagacctgatacaaaatgaccggcgcagaggcaatcaacgacacccagaaggtcagtttgatcggggtaaagaacggtgaagcaacgtctgttgcaatcatcgtcgcgcccagaggcatctgtttaatcagcggcgcggaaaccacctgatagatatcgttggcaaaatagaccagacataaaaaaatgaggaaaaccgcaataatgcagtttaacaggcgcttacgcagctcaatgaggtgcgtaataagcggttgagtatcatctactgccatgtttacgctttatcactcgacgagggggatgattcggaaacgggcgcggcgggttttacctcagccgttttgaccacgggctcttccggcggcacctgctttttcacttcgggctcctgcggcgattgctctggcgaagcagcctgatgctccgcgctggaaggcgttacaccctcgcgctgctcttcgctacccttcaccaccggattgtggatggtgtttgcttcatcgctcgccttctcaggatcgttaatgctgtaagaacgcttcatggattccgccgcttcgcgcaactcatccattgatgctttcagctccggcgtcaggttgtccatgctcgccttttcaacctttttcaggctgtcctgaaattcctgaagcttcagctcctgcgccagctcgttctgcacggtagttgccagcgagcgaagcgcccgcacccagcccacgacggttttcaccgcaacgggtaaacgctgcggccccaacacaatcagaccaatcacaaagaccagcagtaactcaccaaaaccaatgtcgaacacgaattacacctgctctttatcgtgacgtttagcctcttcctttttggcttcgtcctgcttatcggcgatggatttagcggtaaaatcagcatcctgactggttttttcctgcttattctcatcatcgctcatggctttcttgaagcctttgattgacgcgcccaggtcggaaccaatcgatccgagttttttcgtgccaaacagcagcacaacgatgacggcaatgatcactaactgccagatactgataccacccatgcgtgttccccagtgatagatgattaattagtcagatcgcattatacgtatgcaatctctcgatagcgacgctaattcagcgcgtttttcgccagccagcaagccagacaaccacaccggcagccataatccaggctggcatcatttcccagtccggacgattgatcaacagcaacgtgccgcttatcagcagcgtcgcgccaattccgaagagatagcgggactgcccctgacgcacgcgactggattgaagctcgtgcgcgattttatccatgctgtgctgaaggttcttgctctgacgcaaactgtcgtaaaccagttcaggaatttcaggcattttttcaatccagaacgggcctttctctttaagcgagcgaaccagggctggaataccgacctgatccttaatccaggattcgaggaacggtttcgcggttttccacaagtctaactgaggatagagctggcggcctacgccctcaacgtaaagtaatgttttctgaagtaaaactaattgtggctgcacttccatattgaaacggcgtgcggtgttgaacaggttgagcaggacgtgtccgaaagagatctccgagagcggcttttcaaaaatcggctcacagacggtgcgaatcgcaaattcaaactcttccacgttggtatctggcggaacccagcctgaatccacgtgcagctcggccaccttacggtagtcgcgattgaagaaagcgataaagttctcagcgaggtagcgcttatcctctttattcagcgagccgacaataccgcagtcgatgccgatgtatttcggatcttccgggtgctcatagctgacgaaaatgttgcccggatgcatgtctgcatggaagaagctgtcgcggaaaacctgagtaaagaagacctgcacgccacgctcggccagcagcttcatgttggtgccctgcttttccagcgcaacaacatccgagaccggaataccgtagatacgttccatcaccatcatgttctgactgcaatagtcagaatagacttcaggaacatacagcatcgggctgtcttcaaagtttcgacgcagctgaatggcgttcgccgattcacgcagcaggttaagctcgtcaatcagcgttttttcgtattcccgaaccacttccagcggacgcagacggcgaccatccggcaacagacgcggcacccagcgagccaggcgataaatcagcttcatgtctgctttgataaccggcaggatatccggacgaatcactttgatgaccacctctttgccattttccttcaggcgcgcggtgtgaacctgcgcaatagaggcagaggccaggggctgaatatcgaaatcatcaaaccaggtctcgatggggatattgcccatcgcttcttcgatttgtttcttcgctctctctccgtcaaacggagcaacgcggtcctgcaatagcgcgagctgatcggcaatctgcggtgggaaaaggtcgcgacgtgttgagagcatctgcccaaacttgatccagaccgggcccagctcctgtaacgcaagacgcaggcgtgcgcccagctcctgatccttatggcgattcggcatccagaacagcgtgcgacgccaaagccgaagcggcagggtgatacgcattctggggataagctcgtcgagcccgtagctcaaaaaggtgcgaacgataaaatagaggcgccgaatttcaccaggcgtcatttgccctccagtttttccagccgtttggttaacgcatcaactgcgcgctcaactgccgcggtctcttctgcaaaccaggcgacttctaaaggccccggcgccatacgccactcttcggtcagcacctcggcagcgtagcgctgttgacggagcagacctttacgcaggaaagcggaacccgtgcgcagcgttttgcttataccttcagccgcgatgtcgccgatatagggcgccagcagttccgccgggtcgaattcagcctgatcgctgagtgcaacgaagttctgtaccacctgaatatcgccttcgacctccagctcaccgctgcgaataagcgccgtcatctgctgacggtcacgcagttttggcaatacgctcatgtgcgtaatcaccgagcagtcagcctcgccttcccactcacccagaacgtcaagctggcgttcgctgaagaccaacacaagcggcgtcgagaactcctttaaaacgatgcgcagcacctttccgttaagccgctgacgtgcggttttcagcgccggagcgcgatacagaaaggcattcagcacattctcgatgccagcggtgactaagggtttaatgggcacgggaaacctccactcagaacttgtaaccacgatgcagcgcgacgacacccgccgtcatattgaagtattccacgttttcaaactccgcatcctgcatcatcgctttcagcgtgtcctgatccgggtgcattcggatggactcggccagataacggtaactttctgcatcgtttgccaccagctcgccgatgcgcggcagaacgtggaaggaataagcatcgtaagctttgctcagcgggtcgataatcggtttagaaaactcgagtaccagcagtcgaccgcccggcttaagcacgcggtacatggagcgcagcgctttatctttatcggtcacgttacgcagaccgaaagagatggtgatgcagtcgaacgtattatccgggaacggcagcgcttcggcattggcctgaacatattcaacgttgcctaccacgccgatattacgcagcttttcgcgtcccattttcagcattgagtcgttgatatccgccagcaccacgcggccggtttcgccaaccagacgggagaatttagcggtcagatcccctgtgcctccggctaaatccagcaccgtttgtccacggcgcacgccgctgcaatcaatagtgaagcgcttccacaagcgatgaatgccaaatgacatcaaatcattcatcacatcgtacttcgccgccacggaatgaaatacgtgggccaccatgtcagctttctgcgctttggcgacagtctgaaagccaaagtgcgttgtgtcttgtgaatcgtcaaccatctcagagcctgctaatcagtcaaatgttcgtgaagtgtaacagattgggcgcatttgccctacgtttcaaccaccgtgaaagaaacgcgccggctgcgcttcgggggataaactcgccgctaaatcgttgtcttcattgcggctattttgcttaccgtcgccttcacgcagacgaaactcttcgtcctgagcggtagcctgctccaccagttccggattaatctcgcgtttaacttccacccccaggctgcgaaacgcctccgcctgcgccagcaaattgccacgcccggaggagagttttttcatcgcctggcggtagttatcctgcgcgcgatccaggctttgccccaccgaggacatatcgtccacaaacagccgcattttgtcgtacagcttgctggcgcgatcggcaatctgctgcgcgttacggctttggtgctcatagcgccacaggttggcaatggtacgtaacgccaccagtagcgtggtggggctgaccagcataatgttatttttcagcgcttcggtgatcagttcgggctgtctgtcgagtgccagcaggaacgcaggctcgaccggaatgaacatcagcacataatccagcgatcgcagccccggcaactgctgataatcttttctgcccagcagacggatatggttacgcacggaggcgatgtgctcctgcaacgctgtttcgcgggtgtagtcatcttccgcgttgaagtagcgctcataggccaccagcgtcattttggcgtcgataaccacatctttgccctgtggcagacgaacaatgacatccggctgcatccgcgagcgcgcatcgttctcaatgctgacctgcgtttcgtattcgtatccttcgcgcaggccagaggcctccagcacacgcgtcatgaccacttcgccccagtttccctgcgctttgttatcacctttcagtgcgcgcgtcaggttaaccgcctcctgcgccatctgcgcattcagctgctggagattacgaatttcatgcgccagcgtgtggcgttcgcgggcctcctgaccaaagctgtcctgtacctgacggcgaaagccgtccagctgttcacgcagcggcgtcagcaggctgttcaggctctggcggttctgctcatccacgcggcgattgctgtgctcaaaaatgcggttcgcgaggttctcaaactgctcgctaagacgctgctcgctgttgatcatctgacggattttgtcttcggcgtgcagttgggtggactcaagacgggtggtcacttcacggagatcggcctccagcgaggtattgatatcacgcagattgcgcagttcgttattgagcagttcgcattcgtcgcgccagtggtcactcagcgcaagctgttgtttcgtcgcgctaagttcagcgacgatctcttcgcgctctgccagctgttcggctttctgctgcgcatgctggtagccggaaatgagccagccaattcccacgctcaccagcgcaatcactgcataaatcaggattgagatatccacaatgccccctgcatcaacgtattaccgcacaaaatagaattgtgctgtatgaacgtccagtttgaaagggttttcctgcgaggcgttacgcaaaaagaaaaggccgagcatgtcggcctttcagcactgaagagagaattagatcaggcggcgcgccgcttcaaccacgattttcaccgcatggctttcagtctgcttcatggtttcagcgttcgggatctcctgctgagtacggttgacgataacgcccgccaccataccggcacgcagaccctggcttgcgcacatggtcagcagcgtcgcagattccatttcgtagttcatgacgcccatcgactgccactcttccatggagcctttgaaacggctcaccacgcgaccagagaaggtgtcgtaacgctcctggcccgggtagaaggtatcggaagaggcagttacgcccacgtgggtggttgcgcccacggacttcgcggcttcaaccagcgcggtggtgcattcgaaatcggccactgccgggaattccatcggtgcaaagtgcaggcttgccccgtccagacgcacggatgcggtggtaaccagcacgtcgcccacgttgatgtgcggctgaatggcgcctgtggtgccgatgcgcaggaaagtacgaatgcccagctgcgccagctcttcaacggcgatagaggtagacgggccaccaataccggtagagcacacgatcaccgctttaccgtccagctctgcgcgccaggtggtgaattcgcgatgcgctgccagcttaaccggcttatccatcagcgcggcgatcttttccacacgctcaggatcgccagggacgatagcaagcgtagccccttgtaaatcgtttttagtgaggccgagatgaaaaacatcagacttagacataggtgactcctctgtgggtcggtttgtcagaagaagtaaaacagtactttacagaagcaatgtgcattatttcgtgacacacctcaccatgaatgaaaatgattgcagttaatttccataaaatagtgatttacatcacattaacaagttatatcgccgggtgctgcacaaaagatagacgctataaggcactgtggattgttaacctggtgtctatatttatctttgcgctaatccattcattggtacggagaatgccatgactgaaaaaaccggttttgcacctgctgcggccccgcatgcttcaaccatcgtctcaacccctgaagaggccattaccgcaggcgagacctccattccctcccagggggagaacatgccagcgtaccacgcgcggccaaaatctgccgatggcccgctgcccatcgtgatcgtggtgcaggaaatatttggcgttcatgaacatattcgcgacctctgccgccgtctggcgctggaaggttacctggccgttgcgccggaactctatttccgtcagggcgatccgaatgattacagcgacatcccgacgctgttcagcaacctggtcagcaaagtgccggacgcgcaggtgctggccgatctcgaccacgttgccagctgggcggcgcgcaacggtggcgacccgcaccgtctgatggtgaccggcttttgctggggcggacgcattagctggctgtatgccgcgcacaatccgcagctgaaagccgctgtggcctggtacggtaaactggtgggtgaaaagaccctgaactcgccgaaacatccggttgatatcgccaccgatttaaatgccccggtgctagggctgtatggcggccaggataccggcattccgcttgataccgtcgagaccatgcgccacgcgctgcgggcggcaaacgcgaaggccgaaatcgtggtgtacccggatgcgggacacgcgtttaatgccgattatcgtccgagctatcacgcagaatcggcgaaagatggctggcagagaatgctggcgtggttcagccagtacggcgggaagaaagcgtaatacaaaaagcccggtggcggctgcgccaaccgggcaatccagccccactacgcctgacgcaagttctgcgccgcctgcaccatgttcgccagcgccgcgcgggtttcaggccagccgcgggttttcaggccgcagtccgggtttacccacaggcgttccgccggaatgcgccgggcggctttttgcagcagcgattcaatccactccacgctcggcacgttaggggagtgaatgtcatacacgcccggcccgatttcgttcgggtagtcgaactcttcgaacgactccagcagctccatgtctgaacgcgaggtctcgatggtgatcacatcggcgtcgagcgcggcaatggagtccatgatgtcgttaaattcgcagtaacacatgtgggtgtggatctgcgtgtcgtccttcgcgacggccgcgttgaggcggaacgcctccacgccccacgtcagataagcatcccagtcgctgcgacgcagcggcaagccttcacgcagcgccggttcgtcgatctgaatgatgccaatccccgccgcttccagatccgccacttcatcacgcagcgccagggcgatctgtttggcgatggtttcccgggatacatcttcacgcgggaacgaccagcagagaatggtcaccggccccgtcagcatgccttttaccggtttgtcggtcagagactgggcatacttcgcccactccacggtgatcgcttccgggcggctgacgtcaccgatcaccaccggcggcttcacgcagcgggagccgtagctttgcacccagccgttctgggtaaagacaaagccgtccaggtgttcaccgaagtattccaccatatcgttacgctcggcctcgccgtgcaccagcacgtccagacccagacgttcctgctcgacgatcgcctgtttgatgtgctccgcaatgccggtgcggtagtgattcgcatccagattgccctttttgaagtccaggcgcaggccgcggatctcggtagtctgcgggaaggagccgatggttgtggtcggccacgcgggcaggttaaagcgcgcacgctgggcttcggcgcgcacttcatacgggctctggcgctggctgtcccgggcagtgatggccgccagacgtttttccaccgccgggttatgcacgcgcgtcgagtgacagcgcgcctggatcggcgcgctccagtcggtaatcgctgccgtgtcgccgctgttcaacgcgtcgcgcagcagagccagctcctcacacttttgcagggcaaaggcaaaccagcttttcacctcagggtcgagtcgggtctccacgctcaggtcgatcgggctgtgcagcagggaacaggaagaggctacccacaattcacgtttaccgacaatgtccttgatttgtgcatatttcccggtgagatcggcacgccagacgttacgaccattcaccagaccggcagagagcagccactccgcaggcagacgcttgtgcaactctgccacatcgtctttgccgtgaacgagatcaacgtgcagaccctgaaccggcagcgcggtaatggtgtcgaggttcggcgttacgccctcgaaataggtggtcagcagcagcttcacctggcccgtgagcgcgtcatacgccggtttgaaggcatccagccacgcctgtggcagctcaagcaccagcgccggttcatcgatttgcacccactgaataccgcgcttacccagctcaatcagcacctgcttataaaccggcagaatatcgttcagcaggctgaggcggtcgaactgctcgcctttcactttgcccagccacaggtaggtgaccggccccagcagcacgggtttcacctggtgacccagcgccagcgcttcgtccacttcatccagaagctgggtccaggtcagtttgaactgctggcccttaacgaactccggcaccatatagtgatagttagtgttaaaccacttggtcatttccgccgctgccgctggctcacccgttggcgcgcggccacggccgatgcggaacagggtatcgatatccaccgatccatcgttgttctgatgacgagccggcacgttgccaagcagcaggctggtggtcagaacatggtcgtaccaggcgaaatcgcccaccggcagcaggtctacgcccgcctgtttttgctgatcccagtgacgcgcgcgcagctcgcgccccaccgccagcagttcttcgcgggtggcgttacccgcccagtagctttcttgcgcttttttcagctcgcgacgcagaccaacgcgagggaaaccgagagtgtgagtgcggattgtcatggcataccccttgtagaaattcgttatttagacgtccagatgtttacacttctataattggcaggtactgtatattcctcaagcgcaaaatgttcatggcgaagtgaaggactttcatgatcgagataaaacacctgaaaacgctacaagcgttgcggaactgcggttctcttgcggcggcagcggccacgctgcaccagactcagtctgccctttctcaccagttcagcgatctggaacaacgcctcggcttccgtctttttgtgcgcaagagccagcctttgcgctttacgccgcagggcgaaattctgctgcaactggcgaaccaggtgctgccgcagattgccagcgcgttgcagtcatgcaacgagccgcagcagaccaccctgcgcatcgccattgagtgtcacagctgtattcagtggctgacccccgcgcttgagaacttccgccagaagtggccgcaggtggagatggacttcaaatccggcgtcacgtttgatccgcagccgtcgcttcagcagggtgagctggatctggtgatgacctcagatattctgccgcgcagcggtctgcactattcgccaatgtttgattttgaggtgcgtctggtgctggccccggaccatccgctggccgctaaaacgcgtatcacgccggaagatctggcaacggagacgctgctgatttacccggtacagcgcagtcgtctggatatctggcgccatttcctgcaacccgcgggcatcagcccacagctgaaaagcgtggataacacgctgctgttaattcagatggtggcggccagaatggggattgcggcgctgccgcactgggtggtcgagacggttgaacgccagggtctggtggtcaccaaaaccctgggtgaaggactgtggagccggctgtacgccgccgtgcgcgacggcgagcagcgtcagccgattacggaagcgtttattcgctcagcgcggaaccacgcgtgcgaccatcttccgtttgtgcggagcgcggagcgacccagcggcgatgtacccacagcgaagccaggatcaccgttcccccaataaggaaactcggccagtgcggctgctcctgccagatggcgaggttcaccagtagccccgccggcacgtgcacattgttcatgatccccagcgtcccggcgtctacctgcgtagcgccgtagttccacataaaatagcccagccccgacgccaccacgcccagccagaccagaacgctccactgcacggaggtagtcggcagcttttgcggattgccgagcagaaaccacgccgctaccgcgacaatcgccgcgcccatatagaaccacgcaaacgcgttatgctgcggcatcgggcgggtctccatcagacgtttgtaacccaccatcccgatggcaaagctgatattagcgagctggacgaacatcagcccggtccagaagtgatcgcttaccttgtcatagcgaataatcgccgcgccaatgactgccagcgcagcgctcagcagatatccccagcgcaaacggcgcctgctgagcaagtcataaatcagcgtgatgtagagcggcgtcagcacggtgaagagcagaaattccgagacggacaggtaaacgtaggcccggaagctgaacaggtacatgatgccgagctgcatcgcgcctaccagcatgtacagcagtatcgtttttagcgactgcccgcgggtacgcaggaacggcaggaacaccagcgccgccagccccacgcgcatcagtaccgagaagtagctgtcgaccgatccagcaaggtattcgccaatcagactaaaggagaaggcccacaggatagtggtgataatgagtagcgccacaatgcttgtctctcagaaagaaggagaggcattgtagcgaactctttagttgacatctgaacaataaacaatcaattgaagattattcaaggaacagtttgcgcagatacttaggcacggcgttatcgccgttggtgccgatcacttccagctccgggtgcagatctttcaggcgctgatgcgcgttctgcatgatgcagcctttacccgccatggagagcatctcggcatcgttcatgccatcgccaaaggcgatacagtctttcagatcaaagcccagccgtttcgctaccgcttccagcgcgtgacctttggacaccccgcccgccatcacttccagacaggtcagcgtggagaagctcacgttcacgcggtcaccccagcgggcgttgatcgcctgctccagcggcagtaactcctcatgatttacacaggtgaagaataccttgctgatcccttccggctccagcagacccggctcgtacagtgagtactggaatacggcttccttgaagaagcgcatctcttccgggcgatggcggttcataaaccactcgtcgtcgcggtaaacgttagtcacgatatccgggttgttatgcacaatgccgaacaaatcggtggcgatgtcacgatcgagattatgggtaaaaatcaggttgccgtccgtgtcatgtacgcgcgcaccgttagaggtgatcatgtacgacttgatctccaggttatcgcggatctgtcccacgtccacgtggtggcgaccggtggcgaacacaaagttcacgccgcgggcagtcaggagttttagggtctctttcgcataaggcgacagggtgtggtcgggggaaagcagcgtgccatctaaatcagatgcaacaacctggtacatagggatttcaacctctggtggaaaacaataatcagttatgcctgttgaaaaattcaacaatggcgttgagcgcgactgagcgcatagcgtccttttcaaaaaggatctcatggtacgcaccgttgatgaccagcggtttacccccttcacagggatggcccgcagcggcgcgaagttcacaatagcggtcatgcatgcggttatccaccacacgctcttcttccgcctggatcaggagcgtcggcgtgtcatcatcgcctacgcccgccagcacctgctcaccggcatgaataccttcccgcacccagtgccaggtggggccgccgacccgcagacgcggttcatcggcataaaaacgcaggttgcggcgataacgctgccggctgtgggttaacacgttgatggcaaacggcaatgcccgccagcgtcctgttccgatggcatagccttctcgaatgcgctgatggccctcagcccagtcgagaagatggcgcaccatccagtcaggaaaacgtatcacaatgccgtacatcggcgcggtcagcgcaatggcgtcacactggtgcttatggcgctgcaaaaacaacgtcgagatcgcgccccccatggagtgggcaagaatataacgcttgcgccacggtccgggctgcacttcctgctgccagaacgcggccagatcgtcgacgtaatcgctgaagttatccacgtggccgcgatgggtatccggcaacatcctgccagaaagcccctgcccgcgatggtcgataattaacacatcaaagcccagatggaacaggtcatacgccagctcggcatatttgatatagctttcgatgcgcccggggcagaccacaatcacccggtcatttttttcatcacggaaacgaacgaagcgtaccgggatttccccgacgcccataaactcatcttcctcacgctggcgccagaaatcggtcagcggccccatggagaaagcagcaaatgcgttttctcgtgtttcccagtcctttttctgctgaaacattgggtttccaccccccgtaattcagggaatatcgtttttttcgtcaccggtcacaaaatgactcaacaatagcgtattgtggcataaaaacagacgatccgggagtttcaaatgaccttcgaatggtggttcgcctacctgctgacatccatcatcctcagcctttcacctggctcgggcgcaatcaacaccatgaccacctccattaatcacggctatcgcggcgcggcggcgtcaatcgccggtttacagaccgggcttggcattcatattgtgctggtggggattggtctgggcacgctgttctcccgttcggtgctggccttcgaggtgttgaaatgggctggcgcagcgtatcttatctggctgggtattcagcagtggcgcgccgcaggctcgattgatctgcatacgctctcccggacgcaaacacgcggccacctgtttaaacgcgcggtgttcgttaacctgaccaacccgaaaagcatcgtgttcctcgccgccctgttcccgcagtttatcgtgccgcatcagccacaggtgatgcagtacgtggtgctgggcgcgaccaccattattgtcgatatcattgtgatgattggttacgcgacgctggcgcagcgaattgcggcgtggatcaaagggcctaaacagatgaaggccctgaacaaagtctttggttcgctgtttatgctggttggcgcgctgcttgcgtcagcgcgtcatgcttagcgagaaatgatgagatgaatgccgaagccggcgaacagcgcgccggcaaagccgtcgatccacttcgcgatgcgctggtagccgcgacgcatcgccggtaaggcaaacaggcttgccacaacggtaaaccaggcgaacgtctcaacaacgatcagcagaaagatcccccagcgcgcgcccgcgccgacgttatcccccacaaacagcgagaacacagagccgaagtaaataatcgctttcgggttcgccaggttggtcagcagccctttcacaaagctacgtccgcccgttgccagctcaacctttggctcttccggctttttctcttctttcttcagcgccccgcgcagcatctggtagcccatccagcacaggtacagaccgccgccgaccatgatgatgttatgcagccacgccattttcgccaggatcaggttcagaccgagcagcgcaaccgccgcccagaccatgacgcccatggtaataccgagcacacccatcattgcctctttgcgggagcggctgacggccgtttgtgacacgaagaaaaagtcagggccagggctcatcagcgccacgatgtgcactaacgccacggtgagaaatagcattaacataattagctcgcggggaaataatgtagtgagtcaccatcctggcactttttcgcccggctgactactcctcgtcatcaccgtcggcgtgagagcggatgagcgccataaactctttcccgaagcgctccagcttacgcgtgccaacgccgttgacgctgagcatctcgctggcgctgagcggcatttgctcggccatctcgataagcgtcgcgtcgttgaacaccacgtatggcgggatgttctcttcatccgcaatggctttacgcagcttacgcagcttggcgaacagcttgcgatcgtagttaccgccgtaggatttctgcatcacgcgcggcttcagggcgacaacgcgcggaacggcgagcttcagttcaacctcgccacgcaggaccggtcgcgccgcttcggtcagctgaagcgcagagtgctgggcaatgttctgcgtggcaaagccgagatggatcagctggcggatgatactcacccagtgctcatggctctggtctttcccgatgccgtaaaccggcagcttgtcgtgacccatatcgcggatacgctggttgttagccccgcgcagcacttcaacgacgtagcccatcccaaagcgctggttcacgcgtccgatagtcgagagcgccttacgcgcgtccatcaggccatcgtactgcttcggcgggtcgaggcagatatcgcagttgccgcacggcgcctgacgcccttcaccaaagtagttgagcagcaccagacggcggcaggtttgcgcttcggcgaaggcccccatcgcgttaagcttgtggcgttcgatatcctgcaactgcccctgcggtttctcctcgagacagcggcgcagccacgccatatccgccggatcgtaaaacagcatcgcttccgcaggcaggccgtcacgcccggcgcggccggtttcctgatagtaggattcgatattgcgcggaatgtcgaaatgcaccacaaagcgcacgttgggcttgttgatccccatcccgaacgccaccgttgcgaccacgatttgcaggtcgtcgcgctggaatttctcctgcacgtcggcgcggatatggttctccagcccggcgtgataggccgcggcgctaaagccacggttttgcagacgggcggcggtgtcttccaccttcgcacggctgttgcagtagatgatgccggacttaccgcgctgctcctgcacgtagcgtaagagctgatccagcggcttgaacttctccatcagcatatagcggatgttcgggcggtcgaagctgctgacctgaatatacgggtcgtttagccccagcaggcgaacgatgtcctgacgcgtggtgtcgtccgccgtggcggtaagcgccataaacggcagctcggggaagcgctgacgaagctggccaagagcggcgtattccgggcggaaatcgtgcccccactgggagatacagtgcgcttcatccaccgccagcagcaccggattccagtgcgccagatgatcgaggaagttgtccagcatcaggcgttctggcgcgatatacagcaggcggatctgcccggtgcggcacccggtcattacctcttgctgttgctcgcgggtctgcgtcgagttcaggcaggccgccgccacgccgttggcaatcagctggtcgacctggtctttcatcagggaaataaggggcgataccacgaccgtcaggccattaagcaccagcgcgggcacctgatagcagagcgattttccgccgccggtcggcatgaccaccaggcaatcgcggccttccagcacggtttcaatgatggtttcctggccagggcggaactgctggtagccaaaggtttcctgcaaaacctgtttagccagcgattcctgattcaatacttccgcctgcgccacgttaaccccatatgccagaaatgaaacaggcgctattttcagcgcctgagagagaaacttcaacgtttaacgcaaaaacattcgagcagcttagaaaatatcgttcagcatgacgcccacaccgacgcgggtctgattgaaattgtagtcgatcagcgattcgccatacccgctatacacctgagtataaagacgaacgtgtttcgttaccgggtagctcaggcccagctctgcaccgccgtagccggtattccagttgtactggcctttggcgctcagcaccgcgtcacccagctgatagcccactttaagctgatagtagcccatatatttggtgatatccgggttgtcatcggtgctgcccaccacgtaccacggcttcacttccaccatgaaattgccgttctgcgccatcagacgcgtatagatgcggttccagctgcgtgaggttgggtcggaacgaccgttggaatcgtggttatagcccacctccacgtctcgcagcgtccagcctgcaaactcataatcggtggcgaaaccgaggaacagctgcggttcatagttggtttcgcggaacggtgaagattccccgctgttggagagctgccaccatgacttctgcgtgtaagacgcgccaagcaccgagttcggccccaggatgccgcgccagaacgggaaggcgaggctgagctggaacttcacctcatctttacgcgcattatcagaccagttataggagcttatcgcctctttgttgagatcgctggtctgggtgtagatcacgtagtttgtatcataagggtacagcgtgaacggattgtcatgctcctgaagcatattggcgatgatgctgcccttaacggcaggtttatcatgcacctctttgatcgtcgcttcctgcgcatatgctgtgaggggcagcgcaaccgccgccagtaaccaacccagatacgtccgcatcggtggtgttctcctgaaatggtgacatttaatgaatagttttgtccgggcattctacagacttctgcgataacttccgcttcctcgtttcttaaagtggcattcctttatcccgaagcataaaatcaacattttgttaacaacaaggatgccacgtcagatgtcagccacactcaccgccgaagaaaccttaaagctcgtgggcgagatttttgtgtaccacatgccattcaaccgtgcactgggtcttgagctggagcgatacgaaaaagacttcgctcagctgagtttcaataatcagccaatgatggtcggtaactgggcgcaaagcattttgcacggcggggtcattgcctccgcgctggacgtggcggccggtctggtgtgcgtgggcagcacgctgacgcgccatgacaccatcaacgaagatgagttacgccagcgcctgtcgcgcatgggcaccatcgatttacgcgtcgactatctgcgtccgggacgcggaaaccgcttcacctgcaccagcagcctgctgcgcgccgggaataaagttgccgtcgcccgcgttgagctgcataacgaggagcaggtttatatcgccagcgcaaccgccacttatatggtgggttgagacggcaaattcgggtaaaattacttcacttttttgtaacggannnnnnnnnnnnnnnnnnnnnnnnnnnnnnnnnnnnnnnnnnnnnnnnnnnnnnnnnnnnnnnnnnnnnnnnnnnnnnnnnnnnnnnnnnnnnnnnnnnnnnnnnnnnnnnnnnnnnnnnnnnnnnnnnnnnnnnnnnnnnnnnnnnnnnnnnnnnnnnnnnnnnnnnnnnnnnnnnnnnnnnnnnnnnnnnnnnnnnnnnnnnnnnnnnnnnnnnnnnnnnnnnnnnnnnnnnnnnnnnnnnnnnnnnnnnnnnnnnnnnnnnnnnnnnnnnnnnnnnnnnnnnnnnnnnnnnnnnnnnnnnnnnnnnnnnnnnnnnnnnnnnnnnnnnnnnnnnnnnnnnnnnnnnnnnnnnnnnnnnnnnnnnnnnnnnnnnnnnnnnnnnnnnnnnnnnnnnnnnnnnnnnnnnnnnnnnnnnnnnnnnnnnnnnnnnnnnnnnnnnnnnnnnnnnnnnnnnnnnnnnnnnnnnnnnnnnnnnnnnnnnnnnnnnnnnnnnnnnnnnnnnnnnnnnnnnnnnnnnttttcttcatgattgcgctgatgagtatcagccgtcagtggtcaggcgtcaaaacgctgctgaaaaccccgaagaaggtcttcctgctcgctctctctgcggtgctgattggcggaaactggctgctgtttatctgggcggtgaataaccatcacatgctcgaagccagcctgggctactttattaacccgctggtcaatattttgctggggatgattttcctcggcgagcgctttcgccggatgcagtgggtggcggtgattctggccttctgcggcgtgctggtacagctgtggaccttcggctcactgccggttatcgccctggggctggcgttcagctttgccttctacggcctggtgcgtaaaaaaattgccgtggaagcgcagacgggaatgctatttgaaaccctgtggctgctgcctgtcgccgcgatctacctgttcggtattgccgacagcgccaccagccacatgggcagcaatccatggtcgctgaacctgatgctgatggccgcgggcgtggtcacgacgatccccctgctgtgctttaccggcgcggcaacgcgtctgcgcctctccacgctgggcttcttccagtacattggcccgacgctgatgttcctgctggcggtggtgttttacggcgaggtgccgggtgcggataagatggtgacgttcgcctttatctgggtggcgctggccatctttgttgcggatgcgatttatacccagcgcagggtgcgcaaagggctgtgatgttgccctcaccctaaccctctcccacagggagagggggccgtctgtgcaggcattattttgtggggaaccctctcccacagggagagggaattcgatcgtagggcgggtaagcgcagcgccacccgccagatttttacagccagttcttccgcttgaagtacagatacggcgccagcccggcgagaatcataaagataatcgcccccgggtagccaaagctccacttcagttccggcataaactcaaagttcatcccgtagctggacgccaccagcgtcggcggcaggaacaccacggacaccaccgagaagatcttgatgatgcggttctgctcgatgttgataaagcccatcgccgcctgcatcaggaagttgaccttctggaacagggattcgttgtgcggcagcagggattcgatatcgcgtaagatctcacgcgcctgctccagctgaccgcccggcagacgcgccttgcgcaccaggaagttcagcgcgcgctgggtatccatcagacacaaacgcaccttccagccgatatcttccagctcagccagcgtggacaacgcttcgtcgtactcatcgccctgatggccttccatgatcacgcggctcagcttttccaggtcgctgtagatgttttcgatttcatccgccagctgttcgattttggtttcgaacagatccagcagcagctcataagcgttgccgtccatcatcgcctggctgcgggcacgcatacggtagagacgaaacgcaggcagttcgcgctcgcgcagggtgaacaggcggccatcgcggatggtaaacgccacggtggagttccccgcgtggtcttcggcatcttcgaaaaagaagaaggagtgaatgtgcaggccgtcttcgtcttcaaaaaaacgggcggatgcttcgatgtcttccagttccgggcgtgtcgccaggctttgccccagttcagattgtacgcgaaggcgctcatcgtcgtccggctcgaccagatccacccatacggcatcaatgaggggctgtgactcttcggcttcaagccgagtcagtcggttattttcgagttgaaatgcgctcaacatgaccgggactcccaatgcaaaaaatatcggacagttcggtgggcacacagaaacaaattgggtttcagaccattaaacagcctgactcagcgcgacgggaatgatgcagtcgctgacaaccactaaggccatcagcaagaggagatagccttaggagttgttcctggatgacagggaattgagccagtatctactgggtgtgtccaaggcgaatgtcctcttagcgtaatcgtgcgcgcatgttacgccagcaataactgtggcgtcaacacgcaacggaacgctgaagggcattaattgaccttcaacgtataaggctagcagattattacaaaatagtgatatttttctgaaagttacacactttccagcttggcataggctgccaccagccatttgatcccctgcccctggaacgctacctgcaaacggctgtgctcgccgctgccttccaggttgacgatggtgccttcgccaaacttcgagtggcgcacgcgctggcccagcttgtaaccggtgtcggtttcagagatcggcgagcccatacgctgatggctgaccggacggctgatgctggcgcgcaggcgcacctcttccacacactcttccggcagttcgccgataaagcgcgacggacggtgatacacctctttcccgtacaggcggcgggtttccgcgtaggtcagggtcagtttctgcatcgcacgggtcacgcccacgtaggccagacgacgctcctcttccagacgcccgccttcatccagcgacatctggctcgggaacatcccctcttccatcccgacgatgaacacctgcgggaactccagaccttttgcggagtgcagggtcatcagctgaaccgcatcctgccaggtatcggcctgcccttcccccgcttccagcgcggcgtgagagaggaatgcctgcaacggcatcaggtcttcgtcttcttcgttgtagctgaactggcgcgttgccgtcaccagttcctctaagttctcaatacgggtctggcccttctcgcctttttcctgctcgtacatggtgcgcaagccggaatctttgatcacccggtcggtctggacgtgcagcggcatgtcggccgtttcctgcgccagcgcgtcgattaactccaggaagcgctgcaatgcgctggcggcgcgcccggcaagggctttttcctgtaacagctcgcggcacgcctgccacaacgtgagctgacgatcgcgcgaggcctgacgcaccacgtccagcgtacgatcgccgatgccgcgcgtcggcgtgttcaccacgcgctcaaacgccgcatcgtcgttacggttggcaatcagacgcaaatacgagagcgcatctttgatctcctgacgttcgaagaagcgcataccgccataaatgcggtacggcatgctcacctgcaacagcgcctcttccagcacgcgcgactgggcgttgctgcgatagagaatggcacactgctccagcgcgccgccgttctcctgccaggttttaatgcggttcaccacgaagcgggcttcgtcgagctcgttgaaggcgcagtaaatcgaaatcggttcgccgtcgacgccatcggtccacagctttttacccaggcgcccgttgttgttctcaatcagggcgttggccgcgctcagaatgttgctggtagaacggtagttctgctccagacggatggtttgcgcgccggggaaatcgttgaggaagcgctggatgttctccacctgcgcgccgcgccagccgtagatagactgatcgtcatcgcctacgatcatcaccttgccggtatccccgaccagcaggcggatccaggcgtactggatgttgttggtatcctggaattcgtccaccaggatgttggtaaagcgttcacggtagtgttgcaggatatgcggtttgttcagccacagctcgtgggcgcgcagcagcagctcggcgaaatccaccagaccggcgcgatcgcacgcttcctgataggccttgtagacgttctgccaggtctgctcgaccgggttaccgaagctctggatatgatgcggacgcagcccttcgtctttctgaccgttgatgtaccacatcgcctgacgcggcggccactgcttctcatcgaggttcatcgccttgatcaggcgtttcagcaagcgcagctgatcttcgctgtcgaggatctggaaatcctgcggcaggttagcgtccatatggtgcgcgcgcagcagacggtgcgccaggccgtggaaggtgccaacccacatgccgccctggctggtgcccatcagctgcgcgatacggtggcgcatctccgccgccgccttgttggtgaacgtcacggccataatcgagtacggcgagcagttctccacgctctgtagccaggcgatacggtgaaccagcacgcgcgtcttaccactgcccgctccagccagtaccagcaggtttgtacgcgaggcggcaaccgcgtcacgctgtttatcattaaggctgtcgagcaggtaagaaacgtccattggcaccgtcatgtcatgtcgggcaggcaaatgtttccattcgccaaaaccctgttaatttatacagaacaattgatgattatatcagcgtcgtgagggatgccaaccgtgaaatttccacgtgcggcagaagacggctatccggggtagtcatcagatcggcattttccggcttgatccagcaggcctgcatgccgcagcggatcgccccggcgacgtccgtggtcaggtcgtcgcccacgtgcaggatctcaccgagcggcaaatccagtttttccgctgccagatgatacatatcgttgaacggcttcgagcgtccgtgcgggcccgcgcgcagcacgaactgaaaatagttccccagaccaaacagttcaggctgagcattgccgttggtgatggccaccagcggccacttttcggcgagcttcgccagcgtgtcgtgggtctcctgcggcacgtcgatccggctgcgccatttggcgaagttttccatggccgcttcggcacccgtggccgcgtcctgcgcgctcaggccggcattgagcatcgcctgctcaaccgcacggcggcgccattcggtcacgtcgtggtaaatctccggttcggtttcccgcagggactgacgcagcttctggaagtctttgttctgcatcgctttcagcgcaggatggtagttctgcacaaacgccagcgactcctgctcggtacgcaggatcaccgggcggttatcgtaaagagtgtcatcaaggtcaaacgtcagggctgatatctgaccgagtgggcggtaaaaacgcattatttcccccgtttggcgcgtggatgcgccgcgtcatacaccgaggcaaggtgttggaagtctaagtgggtatagatttgggtggtcgacagattcgcgtgaccaagcagctcctgtacgccgcgcaggtcgccgcttgattccagcatgtgcgtcgcaaaggagtggcgcagcttgtgggggtgaacgtggctgttcagcccctgcttaatgccccactccgcaaagcgcttctgcacgttacgcgccgagatccgcttgccgagtttcgacaggaacagcgcatcttcgtcggcgccaaacagcccgcgaaggtccagccagtgctcaatccaggagaccgcattgcggccgatcggcaggcggcgctctttgctgcccttgcccattacccacacctcgccggactccagatcgaggtgctttaagtcgaggttcaccagctcagagagacgcaggcccgcgccgtacatcacctccagcatcgcgcggtcgcgcacggccagcggatcgttaagatcgatatccagcaggcggtttacgtcgtcgacgtcgatatttttcggcagatgacgcggggctttcggcgtggcgatcccttttgccgggttggctttcagaccgccctgactgaccagccagtcgaagaaactgcgcagggcagagagccggagcgccaggctcgccgggctgagattttttttacggctacgcacgacgaacccgcgtaccgtggcggcgtcacattgttgccagcttttcaggccgatttcatcggcaatctgcatgatggcatcaagctgacgctgatagttgagcagcgtaatagggctgagctggcgttctacgcccagatagcgcagaaagcggttgacgtcagtggcgagcagtccgtccgtcatacgcgctcaatccagcgctccagcagctcaggcagcatcagggcgatctcctgcaacagttgcgtgccctgcccctgttcataatgatgcgcgtcgcggctggtaaataacatcacgcccaggtcaccatcgcgccccatcagcgacatcgccaccgagccgatagctttggcttccggcagcaccaccagcagttctggcccgttaagcggccccagatagtggtgctcatggcccagacgctgaatgcgcagcggctcaaacgcctgacggctcagcgccagatgggtaaacccggacggcgcgccaatgcgccagcggtcagggaagagacggatcgtcgcgcctgccagccccagctcgcgcgcccagcggtggaagcggttgaggaactcttcgagactgtgcgcggaagccagacgcgcctgaaggtgcagtagacggtagaacaggctttcgttattgctggcctgctccatcagcagcgtcatgttctcttcgagctgattgatgtggttgcgcgagcgcgccatgtgccattcaaccagcgacacggtctcgcgaaccggatgcggcacgcgcatccgttcgacgacgcgtgcattgcggataaaaaactcaggattgtgcagcaggtaatccacaacagcgctgtcgtccagctctgatacaggttcccgcagttcttcccctggttgcttcatagatggataaacccgtcataaacatgtgtcgccgggccagtcatgtacagtggatgacccgctcctttccaggcgatatcaagacgtccgcccggtaattccacgcgaacctcttctgccagtaacccctgtgagataccgacggccaccgccgcacaggcaccgcttccgcaggcctgggtttcgcccgcgccgcgctcgtaaacccgcaggcgaatgtgttcacgcttcaccacctgcatgaaaccgatgttcgcccgctccgggaagcgctcatggctttccagcaccgggccgagcgtttcaaccgccgcggtttgcacatcatccacctgaatcacgcagtgcgggttacccatcgagacgacgccgcacaatactgtctgctcggcggcacgcataatataggtcttttccgctttgttggcgcgaaacggcacggcagaggggtcgaagtttggctcgcccatgttcacgcgcaccagttcgtcgtcggtgacgctgagcaccatccggccgttggcggtgctgacgcggatatcgcgcttgttggtcagccctttcagccgaacaaagcgggcaaaacagcgcgcgccgttgccgcactgggaaacttcgctgccgtcggcgttaaaaatgcggtagtgaaaatccaggtcaggatcgtaaggcggctccaccaccagcagctggtcaaaccccacgcccacgtgtcgatccgccaggcgacggatcaattccggggagaaaaagacattctgcgttaccgcgtcgacgaccataaagtcgttgccaaggccatgcattttagagaactgcatcatttgctccattgcgcgggtacagaacgtaattgtcagagattgacctgagtcgggccgccattattgccgcgatcgttggtatccggcgtagatgactcgataccactttgcaccggttttgtcggcggtggtgcgtttttatcctctggcgggaagtacagtggtcccttcagtccacagccggtcaggctaaacagagtgacaagaacgacaagcgttcggaagacgtttttcatgtagaggttgcccgtaagttcaaatctgtttctatcatcgcaggagaagacacaaaagcaagagtttgccgctttcctgcaacgggaattatttagcgttatactgccgccatcacgaaaaacaggaataaaaccatgaacgacagtgaatttcatcgccttgccgataccctgtggatgaccatcgaagagcgtatcgacgactgggacggcgacagcgatatcgattgtgaaatcaacggcgggatcctgaccttaagcttcgaaaacggcagcaagattattattaaccgtcaggagccgcttcaccaggtgtggctggcggcgaaacagggcggctatcactttgatctgaaaggtgacgagtgggtctgcgatcgcagcggcgaaacgttctgggatctgctggagcaggcagcgacggcgcaggcgggcgaggacgtgagtttcaggtagttgcgttgcccggtggcggctacgccttaccgggcctacaacgactcgaaccgtaggccgggtaagcgtcagcgccacccggcaacagcggctaaaacgtaggccgggtaagcgatagcgccacccggcgaaaagcctcaggaaaaatactgctgcaacagcggcgcagtttcctggttagcgggcgccgcaggggtaatcgcctgcgtacggaacgggatcacctgcgctcgcccatccacattaacaatctggtagaactgcggcaggttgaagttgataaagcttgagccgtaggtaaagcgatcgtgcgaggacgaatagaagcggctgacgtcgcgcaccagctcctctttgctgccttcacagtggtgatacacctcggcacggttggtttcatccagaatgtagatgttaaacccggcgttatcgcccgactcttcgaagaagaactgaataatcccttcactcgcaaagccatccaccacctgcggcagcttaacgtggttggtttccacctgaaccgacaggccatgcagtttgttgtgtgaaatcgcaccgtagaattcaatggcgttttccagcttctgcaccgacacgttcaggcgctcaaagaacagcccccaggtctggccggagacgcgcagcgctttaaagcgcccggtttcctgtcgggtgctggagagacgcagttcgatgcactcagacaccagttgctgaacgcgggtacgaatcaggccgcgcaggtgctggctgtagcagaacacctccacgctgtccggcggcgcggcgtcctggtgcatcttgccgaggatcgttttcagcgcctcgatcatcgcctgctcgccgttaaagtgtagggtacgcacttcgttccacgagttgcggtacagcagatccacgctgcccaccaggcagttttgctgctcgccaaagctaaagacgtccagcttgcggaagtcaaagtgaaccacctgattgcggaaggccgccgtcgggtcgtattccaggttgacgatgatcgccagatggcgaatctcacacgggctgtagagcgcttttggcgtcggcgcaggcagacgcagcgggaagtggtgcgagacatccgccaccatctcctgcaacttggctaaatcgaccacctcgttgcctttgataaacaaccgggtacgtgaggtgagaaggccgttaaaccaggcccaggccaccagcttgttcaggtagcggttatattccagcggctgatggctgatgatcgaatccatgcttggcgcacggttgtacagataccacccggtgcggttcgcgcggcccggcggtacgtagataaaggtcagattcggttcagacaggtcaggcgaaatctgtgggttaaccagcgttaccttgcccggcaacgcttcaaacgcggcgtacagtttgcgggtcagcaccccgatatcctgtgggctggcagaaacgctaaggttgttacggcgggcaaagcggatcaggttgcggtagctctgcatcatcgcatcaagcagttcgttgtgcgcctcacgcacctgatcgatcttccagttggcgcggttgtcgagcatggcgagacgctcttcgtcccatccccactctttgactaactggctgacgacttcacgacgccagcccacgcaggcgcgttcgcggctcagtttttcacagactttgagatagaaacatcgacgcaccaggtcaagacgcgtggcgtcatcaatggctgtcaggtattcggtgacgcgttccagcatcatgcagtaggcatcaagcccgtaggagacgatctccccgtcgtgcagacgctgtttaatatctttcgccagcaggcgcggcgtggggtattcccaggagtaggcttccagcagcagggttttcagcaccgctttgtacggtgaatcaatgctcttataaagctgccagaggcttgcgccaaagtactcttcggcggacagggagctcaggccgcccagatccagccactcgtttggcgtcagaacgccctgcgagtaaagcgacatgacgtagtcgtcataattctcttcttcatcgcacggcaccatattccacagaatacgtttcccggccaggcgaacggcagtacggtaaaactcatccagcaacaggatgtgctgagtcgagccgcagtcttcaccacccagactgccgctttcgttatggcggaaacggttttcatcaatcaggaagaagctcacttccacgccgagcgacgccgcccagctctccagcaggctgcatttacgctgcaacagctggcgctcttcattgtcgagccaggactgatggcagacccagatatccaggtcagaagagcaactttgcccaaccgatgacgtgctgcccatggagtaaaccccggtaatcggcagctcgcctttcggcgaatcctgcggcggcataccacggtagagttcaagttcagtcaggtaatgctgttgggtttcatcaggcgtgaagaggcaaatgccctggggaacgttaccatcaaggtaacccggcatcagcggatggtgatagtgcaacaatgttggcagtagactgtatacctgctggaaagcagggcccatggcagcaagcgcgcgatccacacgcaattgattgatggcatccagtctctgtttcagagtctcaatatagaggtacaagacgtatcgcctgatgtttccgggtgtcgcacgccagtcagaacagaaaaagcagcggacccgcagtatttcaaaaaataaccgttacccttttttcgccttttgcttttctggtggtacagacgaaaaaatggtctaaaacgtgatcaatttaacaccttgccggttgaccgtaaagaaagatgcgctacatacaagtgtagcaccgttcttgacgtgtaaattcctgaatacggcgatggctgacgagtacgccgccctgtccctctcactcttcatcaaccgtaaaactgccatccgagtgtcaacaatgttaggatggttagcgattgataatgacggtaacaagcatgttagacaatgttttgagaattgccacacgccaaagtcctcttgcactctggcaggcacattatgttaagcagcgccttgaagcctgccacaccggattacgcgttgagctggtgccaatggtcacgcgtggcgatgtcattctggatacgccgctggccaaagtgggcggaaaaggtctgtttgtcaaagagctggagctggcattgcttgaaaaccgcgccgatatcgccgtgcattcgatgaaggatgtgcccgttgagttcccggaagggctggggctggtgaccatctgcgagcgcgaggatccgcgcgatgcgtttgtctctaatcgctatgactcgctcgatgcgttgccggcaggcagcgtggtcggcacgtcaagtttacgccgccagtgtcagctggctgaacgtcgcccggatctggtgatccgttcgctgcgcgggaacgtcggcacacgccttggcaagctggataacggcgactacgatgccattattcttgcggttgcgggcctgaaacgcctggggctggaagaacgcattcgcgtcgcgttgccgccggagctgtcgctgcccgccgtcggccagggtgccgtcggcattgagtgtcgtctggttgatgcgcgcactcaggcactgctcgcgccgctgaatcatgacgataccgccgttcgcgtaaaagccgagcgcgcgatgaatactcgcctcgaaggaggctgtcaggtgccaattggcagctatgctgaattaactgacggtgagctgtggttgcgtgcgctggttggcgcgccggacggctcacagatggttcgcggtgaacgtcgcggcaagccgcaagatgccgaggcgcttggcgtatcgctggcggaagagctgctgaataacggcgcgcgtgaaattctggctgaggtctataacggagagccccctgcatgagcatacttgtcacccgcccttctcccgcaggagagcagttagtgagccgtctgcgcgcactggggcaggtggcctggagttttccgctgattgagttctcccccggtcgcgagctgcctgagctcgctgaccagatgcgtctcttgcaggaaggcgatctgctctttgcgctgtcgcagcatgccgtggagtttgcccatgcgcagctgcaacagcatgccgttagctggcctcacgccccccgctatttcgccatcgggcgcaccacggcgctggccttacataccgcgagcggaatcgatgttcgttacccgttagatcgggaaatcagcgaagtcttgctacaattacctgaattacaaaccattgccggaaagcgcgcgctcattttgcgcggcaacggtggccgcgaactgctgggcgaaacgctgcgcgaacgcggcgcagacgtgacgtttgtggagtgctatcagcgctgtgcgaaacactatgatggcgcggaagaagcaatgcgctggcacgcccgcggtattaatacgctggtggtcaccagcggtgaaatgttacaacagctttggtcgctgattccgctttggtatcgcgaaaactggttactccgctgtcggcttctggtcgtcagtgagcgtctggcgaaccacgcccgggaactgggctggcaggatattcggatcgctgaaaacgccgacaacgatgcgctgctgcgcgcattacaataactctcaaatgggaagccataatgacggaacacgaaaaatcctccgccgtggttgaagagaccagggagactgtggacaccacgtcacagccagagacgacagacacaaccgttgagaagaaaaacggcagcaacaaaaccagcctaacgctgagcgtgattgccatcgcgattgcgctggccgcaggcgtgggactctacggactggtgaagaaacaaggcaccaaccagacggccaccagcgacgcgctggttaaccaaatcactgccctacagaaagcgcaggagacgcaaaaagctgagctggaaggcgtgatcaaacagcaggctgccgccctcgccgacgcgaacagcaaacgtgaagagttgaccaaacagctgagcgaagtgcaggaaaaagtcgccacaatttcgggaaccgatgccaaaacctggctactttcacaggccgattttctggtgaaactggccgggcgcaagctctggagcgatcaggatgtcaccaccgccgccgcgctgctgaaaagcgccgacgcaagcctggcggacatgaacgatccgagcctcatcaacgctcgccgcgctattacggaagatatcgccagcctgtccgcggtttctcaggtcgattacgatggtatcatccttaaggtaaatcagctctccaaccagattgataaccttcagctggccgataacaacgacgatgactccccgatggattctgacggcaccgagctgtccagctccctgagcgaatggcgtatcaacctgcaaaagagctggcagaactttatggacagctttattaccattcgccgccgcgatgaaactgccgtgccgctgctggcgccgaaccaggacgtctatctgcgcgaaaacattcgctcccgcctgctggtggctgcccaggccgtaccgcgtcaccaggaagagacctacaaacaggcgctggataacgtttcaacctgggtacgtgcttactacgataccaatgacgcaaccacgaccgcgttccttgaggatatcgacaagctgagccagcaaaacatcaccatgaacgtgccggacaagctggaaagccagccgattctggagaagctcatgcagacgcgcgtgcgtaacctgctggcccagccgggcgttccggcagagcgtccggctgaagcacctgccgccgcgccagcgcctgaaagcgcgccgcaaggagagtaatgatgctaaaagtcttcttactcttcatcctgctgatcgccgggattgtactggggccgatgctcgcgggtcaccagggttatgtattgatccagaccgataactacaatatcgaaaccagcgtaacagggctggtaattattctgatcctgggtgtggtcgttctgctggcagtggagtggctcctgcgtcgtattttccgtaccggcgtacatacgcgcggctggttcgttggccgtaagcgccgtcgcgcccgcaagcagaccgagcaagcgttgctgaagctggccgaaggcgactatcagcaggttgaaaagctgatgtcgaaaaatgccgaccatgcagaacagccggttgttaactatctgctggccgctgaggcggcgcaacagcgaggcgatgaggcccgcgccaatcagcatcttgaacgcgcgtctgagctctctactaaagatccgattccggttgagatcacccgcgttcgtctgcaactggcgcgcaatgaaaaccatgccgcccgtcacggcgttgaccgtctgctggaaattacccctcgtcacccggaagtgctgcgtctggctgagcaggcatatattaggaccggtgcctggggctcgctgctggacattatcccttccatggcgaaagccgacgtgggcgatgatgaacatcgtgatgaacttcagcgtctggcctggattggcctgatggatcaggcgcgcgccgatctcggcagcgacggcctgaaaacctggtggaaaaaccagagccgcaaaacacgccagcaggttcctcttcaggtggcgatggcagaacatctgattgagtgtgatgaccatgacaccgcgcaggagatcctcctcgacggtctcaagcgacagtatgatgaccgcctggtgatggtcatcccgcgtctgaaaaccaacaatccggaacaaattgaaaaagcactgcgccagcagatcaaaaccgtgggcgatcgtccgctgctgtggagtacgctgggccagtctctgatgaaacacggcgagtggcaggaggcgagtctcgccttccgcgccgcgctgaagcaacgtccggacgcatttgattacgcctggcttgctgattcgctggacaagcagcataagccggaagaggccgcagctatgcgccgtgatgggctgttattgacgttgcaaaataacggaacgcagcagtaattaacaggaggccagatggcctccttttttacgcccataaaaaaacgcctgctataaaagcaggcgttaaaacaggtctgtaagacaacatatttggtgcttcactcaacgttgtgtccatggtgtctgatgaggccgaagcgacatctgtcagtggacgataagcaccgtaaacggctctgcgtcattcctgagtttatgaggccttaaggcgaacataagagatggaatgagcatctacacgcatattattgcatgtaatgtgccaggtttacacgcagaacttttacatcgcgcaacattttaagataaaaggaaattatgctgttaagaaccgcctgaagccatacaacatcgcgctgaaggcggcgatatgtcgtcaccaggagacaggttaagaggtaaaataataaattatttaatattaatgggttatatgtcgctgaatcgcgacaaggatatagagtgttgtcggggaaaggctacaggataaaaaacgcagaaaacaaaaaaccccgccgaagcggggttcaaaattggtcggcgagagaggattcgaacctccgacccactggtcccaaaccagttgcgctaccaagctgcgctactcgccgatgtactgcttttttgaatttttagttcaactcattaaaagtcgtggtgcgaggggggggacttgaacccccacgtccgtaagaacactaacacctgaagctagcgcgtctaccaattccgccaccttcgcaattcacaactctttcaataatggggtggctaatgggattcgaacccacgacaactggaatcacaatccagggctctaccaactgagctatagccaccactgtattctttcacgcggttctgactacttctcagaccaccgcagctctagcgccgggactaaaatggcgcgcccgacaggattcgaacctgagacctctgcctccggagggcagcgctctatccagctgagctacgggcgcttagcgccgttgcggggctggatattacgtacctccgtccccgctgtctagtgcttttttgaaaaaaatgcgcgtttggttatggtttgcacattttgccgcttattcctccactttatgggcggagccacggcggcccaggccaaaaagtttatatgcagctgtgacggcagccaggaagatcatcccgacaaacagcgacatgcgggtatcttcattaaagtacattccaattaatacgcaaatcaggaacgccatcgtcaaacagttcgcatacgggaacagaatggagcggaacggatggctggcgatcgcttttttgtgcgcctgtcggaaacgcagctggctaatcaaaatgacaaaccacggtaccattcccggcagcacgctggcgctatagacataaacaaacacgcgctgcggattcgggatgatgtagttcaggcaagagccaatcagcagaatcacaatcgacaccgctacgcccgccaccggtacacccacgcgggagactttacccatcaccgccggcagctgtttgttttgcgagagcgcgtaaagcatacgcccgcagctgtacatcccgctgttacagccggagagcgccgccgtcagcaccacaaagttgataatggcggccgccgccgtgatgccaatcttagcgaaggttaagacaaacgggctgccggtggtgccgatctcgttccatgggaaaatggtcacgataacgaagatcgcgcccacatagaaaatcaggatacgccacagcaccttgcctaccgcgctacgcagcgtgacctgcgggtttttcgcctcacctgcggtaatgccgatcagctcaacgccctgataagaggcgacaacgatacagagtgcggtcaggaagcctttccagccgccggcaaagaagccgccgtgtccggtcaggttaccgaaaccaatcgcgtgcccgccgttaccgaaaccaaagaagatgacacccagacccacaacaatcatcacgataatggtggtgactttgatcatcgcaaaccagaactcgatttcaccgtaaaggcgaacggcggcaaggttcgccagcgccacaagccctacggcgatgagcgcgggtatccactgggccatctccgggaaccagaactgcacgtagaccccgatggcggtgatctccgaaatcccgacggccatccacataaaccagtacgaccaggccgtgagatagccaaagaacgggctcatataacggtgggcgtaaacggcgaaagagcccgttaccggctccagaaacaacatttcgcccattgagcgcatgatgaagaagacgaacagcccggcaataatatacgccagcaggacggaaggccccgcccatttcagcgtgcttgccgagcccataaacaggccaacgccgatagtcccgcccagcgcgatcaattcaatatgtcgagcttccagcccacgctgaagctccggttttttctctgccataaatcctcggttgtgtttgctgtttcccgacttattgccgggtattgttttgaggggtactgaaatacggagcgaatggtttcttaaattctggcaaatggcaaacaatgcattaaaaaaatgaatgcattgtacagaaatccagcagttttacagggggggttgcagcgcgaacagcagatcgcgctgcatattgattacattttcccggtgtagtgccaggcgaggtagcgcagcagacgaatctgtcgtttgatacgcgtcggttgagagagcaggcggtagagccactccagccccaggttttgccagactttgggcgcccgcttaacgtggccggtaaagacgtcgtaggtgccgccaacgcccatatagagcgcatccgggctgaccagacggcaatcgcgcatcagaatttcctgccgcggcgaccccatggcgacagtgacaattttcgccccgctgtcgcgcacgcgctcatataacgcctggcgatcttccggcctgaaatagccatcctggctgcccacgatgttaacattccactggctacgcagcttttgttcggtctgcgccagcacctctggtttgccgccaatcaaaaataccggcgtgccttcagcgcctgcgcgttccataagccgctcccaaaggtcagcacccgccacgcgagacacattagcgtcaggaaactttttacgaattgaacgcaccacgctaataccgtccgcgtatttaaactccgcggcttcaatcaggcttttcacttccgcattatcttcaaccgccagcatcttttctgcgttgatggccaccagcgtgcccgatttcatctgcccgtccgcgaacaggaaatccagcgcgtgttgcatgtcacgccagccaataagctgtagcccacgcagcgcataacgcggggctgaagttgtatccgtcatgataatccctactcagacttgcgacagcgttgtgctgccctgtggctcacgtctgtgcacaagccctgcactgtcaaacaaccagtacagcagttttgccagcagcagacagagaccgaaaacgaccataaaaaacaccacgcgtgagacgaacgaatccagcccctcgcgcgccagaacgatcatattgaaaatggcaccgaaacagaaactgtgcaaaacagcggctttgtagcggttggtctcttcgttacccagcgtatatagccagtcgaaccattttattatcaacccgaccgcgatcgcgcccggcaggataaaccacgttccgcccatcactaccagcgagccaatcagggttggggaaatcgccaggcccgaatggttgttcagcacttcccaggtaaagtagttcgccgtattcaggacaataccgggacggtcgggccacagccacgtcggtataaagacatagaaatcgcgaacaatcggcgccagcccctggaattcgattttgtcgtagttttgcagcagtaaagccaggttttcccacggagagaaggtatcgcgcgtcagatacaggaaggtataaaacgcttcgtcgccggccacgttcagtccgtagcgcttcagcgccagccagaacatccccacaatgccaaagacgcctgccgccgccagcatccacagcgagatccagccgcgaataatgccgataaacaggaaaatcgcgaaggcgataatgatgttggcgcgggtgccgccgacgatcatgtaggtcagaatgccaaatgcgacggtgctgaccaggaagaacagccaggctttgctgtcctgacgcaggaaaaagaccaccagcatcgccggaatgaagaaatagaagaaacgcttgagcgcgacgccggagacttcggcggagaaaatctggctataggactgcaacttaaacagtaaaaagccgttatgcatgaagaaaatcgccacgctgacgagggcgatggtcatcagtataacccacgtcagatgggtttctacccggttcattgtaaacagcggacgacggggtgtggtgtctttcgccgcgcgcaggcgcgttttataggtgacgtaatacaccgcgtagaagcaggtcgcagagagcagcgcctgcaacaagatttccggcggagcgacgccaacatcaaagcggaacacgaggatgctggtcagcgggaagccaaagaaaaaggtcagcaaaaacagcagcgagaagaatacgttgaagttaaaacgtacgcgccggaactcaaaccaggtgagcgtggcgataaacagcgtgctcagcagccagaccaccagcaagccgctaaattgcaactggctcatgcgttgtctcctgaagcaatacgcagcgcgcggtgccacggcgtgagatagtcgggctgaaaaagtcgatgctatttttatccaccagcgtgagctgacgctgcgcttcccgtaccacctcgacattaagcgtgtcagaggtaaacagcaccggaatatgctgttcggccatgtcctgccagaacgggttttcgcggttgagcacgcacggtacgcccgcctgaatcagcagacacagcgtaccaatcccctgctgacgggcaaagatgaaatagcccagatcgcattttcgcagcagcgcgagatagtcatcaaattccagcttatcgctgagaatgtgcagattttccgcgctaaacagcgcaagcccctgctggcgaacgtcatcgatgtaggcgtcgttattggcgggatagcccatcggcaccacgacgttcaccgtatcgccaaactgctgatgcaccgcccgcagcgccgcgacatgctcgttactgcgatcgccggaatttcccaccagaatggtcagtttgccctcacgaaccgcgtcattcgccatggtattcagtgccggatccatacgggtcggaaaatagagcagttccccgcgaaccttcgggtgctgtttagcaaaatagttgaggtcgccacgggtagcaaaaacgcagcccacgcgcgcctgcgccagacgacgcagcggatagaaaagacggaacttccagccgtgggagacttcgtagagatccgctccccagatatgccagctgaactgggaaggttttatcccgccgcttaacagcgccagccacagcccggtattgaattgtccgtggaagaagaaacgctggcttcggtccgctttggctttcgcgacaacggctttggtcagggccgctttgtctggccagaaggtgatgtgcaatgccggacacgccgcgctcaggccgttatcgcgtccaacgaccataaactcgcgcgcatcgggcgtgccggatgccagttcatcgttgaagaaccgcagaacggtctggttatgatgcgggatatccgatcccagtatgtgtatcagtgcagtcatgcgcgtttacgccaaagtaaaaatacgccgcaacaggcagcgaaataaacgatataagttgccatataggcctgagccgcccccagcgcaccgtgggtggggatcagccagtgagaaaatgccgtcagcagcgcaaactggccgatctctgccaggatatacaaccgcagcgaagccttcgcaatcaccagatagccgaaaacgtatgcccccactttcagcacatcgccgaccagttgccaggcaaacagagcgcgcatggcggtaaacttcgccgaaaacagcagccagatggcgaaatcacgcagtaaccagacggtaaagctggcgatcgcaaccgccggcaacacaaaacgcagggagcgaaaaatctcgcgggtaatatcctgcctggaagtcaggcgcgataaggttggcagtaaatagacgctaaaggaagccgtaataaattggaggtaagcatctgaaatgctgctcacgccctgccagatccccacttcatcccagctgtaatgcgctgccagcaggtttcgcatcatcacgtaggcaacgggaagcgttaccgaagtgatgagcgccatcagggtaaactttcctagctgccccgccagcatcttgtcccactgcggtttcaggtaattcagcgggacattgcctctgcgcatcagcataaacgctgccggaatgacaacgagcgcaggcaccagcgccagccccagcagcgcgccttcatagccgcccagccgatagcaaaagtagtaggcgataacgccgatgatgctgccgaggatcagcgccagcgcattcccggcggcatcacggaagcctttcatcagcgccagcagcaggtttgcccaggcgatccccatctgaacgagcgccaccaggcgcaccagcccctgataatgcgtgtgtccgaacagcccctggctgatgggtgccgccgccagcaaaaagacgacggccagcaacgtagagaagcccagcaccatagcagaggaggtgcccaccaccgtgcggagcttttcggcatcgtcatgatgctgcgcgacgtatttggtgacgccattgaatatcccggcacccgccagcacgccaagcaccgtgaccagctggcggaagttccctgccagcccaacgcctgacggaccaaatgagacggccagcagcttgacgaccagtaacccggcgccaatttttacaagcgtggacgctgccgtccacaccgacgcttttgccagagacatatcaggcgaaataactcagaagcgaattgatcaccgtacgctggttcaccggcgcgaggttgtagaacaggggcaggcggagcaaacgttcgctctctttggtggtgtagcggtcttcaccggcaaacatcccgaaggcttcgcccgccgggctggagtgcagcggaatatagtggaataccgccataatttccgcctctttcagccaggcaatcagcttgctgcgatcgtcgttatcgcgcagcttgatgtagaacatgtgagcgttgtggatgcagtctgccggaatagtcggcagttcaatacgtccggcttttgccagcggctccagcgcgtcgtagtaggtttgccacagggagaggcgttgcagattgatgcgctctgccgcttccagctgcgcccagagatacgcggcctgtaaatccgccatcaggtagcttgagccgatatcgcgccaggtgtacttatccacctgaccgcggaagaactggctgcggttggtccctttttcacggatcacttccgcacgctccaccagggcacgatcgttaatcagcgtcgcgccgccttcgccgcctgcggtgtagtttttggtttcgtggaagctaaagcagccgatatgaccaatggtgcccagcgcgcgccctttgtaggtggacatcacgccctgcgcggcgtcttccaccacaaacaggttgtgctttttagcgatggccatgatggtgtccatctcacaggccacgcccgcgtaatgcaccggcacaatcgcccgcgttttatcggtgaccgccgcttcaatcagcgtttcgtcgatgttcatagtatccggacggatatccacaaacacgattttcgccccgcgcaggacaaacgcgttcgccgtggagacgaaggtgtagctcggcatgatcacttcatcgccgggctggatatccagcaacagcgccgccatctcaagcgatgcggtacaggacggcgtcagcagtaccttggcactgtgaaaacgttgctccatccactgctggcagcggcgggtaaaaccgccgtcaccacagagcttgccgctgcccatagcagactgcatgtaatcaagttcagtgcccacaacgggaggcgcgttaaatggaatcatcttgtcacctgtataaccagtaggcggtggcgtcgatgctggcaccactcgcaatataacgtttaagcgcagcggtgttgcccatctgggttgcgacccgcagcgtcgatacctgttgttgctccgcccagtgcagcgccgcctgcatgagtttctcgcccatgccgcgcccggctaacaaaccgatgcgcgcctcgtgctcgttgagcctgcgaagcgaaacaaaaccctgaatctgccccccggcagtacggaacaccagacagacgtggtcaaacgtgcctttgaccgcattctctatccactgggcataaaagcggccgctgtcatcgggcgcataccagggcgcccggaaacggctctgagcgaaggccagcgccgccatcttgcgcagcgcggggatatcctgctccgttgcaatttccgcgcccggtgaggcgtggagagccacggtaacagagagatcaacctcaccctcgaccagccggaatccgtgctgctggagggcgtccagcagatcggcgcggtccgccgggatcttagactgtacgcgctgccaggcgctgaagtctgcttcctgcaacgcaggggcattgtcgcgcagacgcactatcgctgagggacgcgcaaagaatgcgctttcccactcaagggcctccagcacgccgttgaggatactcaacgccacacgcctttggtatcaacaacatactgctgacgtacggcatcaccggaaaccgctttgaacgcattgtgatccaccagcagcaccagcacatccgccgtcgccagcgcgtcatccagggcggtaagggtgcagtgaccggcaagttttgccggcagcgcatgaatattcggctcaaccaccagcgtttcaccgctgtgccaggcagcgatcatttcggcaatttccatcgccgggctttcgcgcagatcgtcaatattcggtttgaatgccagaccaaagcaggcaattttcagctcactggcgcgtttgccgctgtcggccaggcaatccgcgaccgtggctttgacctggttgataacccagtgcggtttgtggtcgtttacttcgcgcgcggtgcgaatcaggcgtgcctgttccgggttctgcgccacgataaaccacggatcgaccgcgatgcagtgcccacccacgcccggccccggctgaaggatgttcacgcgggggtgacggttggcaagacgaataagttcccagacgttaatcccctgatcggcgcaaatcaacgacagttcattcgcaaacgcgatgttaacgtcgcggaagctattttcggtcagtttgcacatctcggcggtgcgggagttggtcaccacacattcgccttcaaggaaaattttatacagctcgctggcgcgcgcggagcagactggcgtcatgccgccaatcacgcggtcatttttaatcagttccaccatcacctggccgggcagtacgcgctcagggcagtaggcgatattgatatcggcctggtcgcccgcctgctgcgggaagctaagatcgggacgcgcctcggccagccactgcgccatctgctcggtagccccaacaggtgaagtggactcaagaataaccagcgcccctttcttcagcacaggcgcaatggattttgccgccgcctcgacgtaaaccatgtcaggctcatgatcgcctttaaagggcgttggaaccgcaatcaggtacgcatcggcttctaccggcgtggtgctggcgcgcaggaagccaccgtccaccgcctttttcaccacacgatcgagatcgggctccacgatatgaatttcgccacggttgatggtttccaccgcgtgcgcgttgatatctacgccaacgacctgcttttgacgagaggcaaaggccgccgcagtaggcagcccgatatagccaagaccaacaacagagatggtagaaaaactcatagcgttacccgattgtgtttaagtgcgtgcaaaatacgaccacaagcctgcccgtcaccgtacggattgtgggcccggctcatcgcctgatactcttcatcgtcatgcagtaagcgcgtgacctcttcgacaatacgacgcggatccgttccaaccagacgcacggtaccggcagtaaccgcttccgggcgttcggtggtttcacgcatcaccagtaccggcttaccgagggagggcgcctcttcctgaatgccgccagaatcggtcaggatcagccaggcgtggttcatcagccagacaaatggcaaatagtcctgcggctcgatcaggagcacgttttccacgtggcccaggatacggttgaccggttcgctgacgttcgggttgaggtgcaccggatagacaatctgcacatcctcgttctgcgcggcgatttcagccagcgcgtggcatatttgctcaaagccacggccaaagctttcgcggcggtggcccgtcaccagaatcgttttcttgccgttgttcaggaacggatagcgcgcagcaagttctgcctgaagctcgctgttagccagcacgcgatcacgcacccaaatcagcgcatcaatgaccgtattgccggtgacgaagatcttgctgtcgctgatattttcgcgcagcaggttctgacgtgagttctcggttggcgcaaaatggtacatcgccaggtgaccggtgagcgtacggttggcctcttccggccacggggaatagagattgccggtacgcagacccgcttcaatatgaccaacggggatacgctgatagaacgcggccaggctggtcgccacggtggtggtggtgtcgccgtgcaccagcaccacatccggcttgaacgactccagaataggctttaattcttgcagaatacggcaggtgatttccgtcagtccctgtcccggtttcattatattgagatcgtaatccgggacgatagaaaagagggttaagacctgatcgagcatctcacggtgctgggcagtcacgcacactttcgcttcaatatcaggatctctggccagcgcatgaaccagaggcgccatcttgatggcctccggcctggtgccaaatacggttagtactttcacatcgattctcttcgattagacgatgaaggccgcagccttcatcgtagacggcgttcttagtttgtgcggcgacgcaataacgctacgccagcgccagtcagtgcgcccacaatcccccacatgatcatcaggaatgcgcgacgcggactatcgcgttttacaggctcttcaggcgttcttaaataacgataggtctgaaaacgcgggtccagcgttggaccgacgttgagcgtattgagcatggcgcggttttggtcgtaatcaaggtcaaagtcagggccaacggcctggatattttccagacgtgcctgaagcattgggcgaccaagaaggaacatttctgaatccgggagttcgtcagccggaacatccgtttcgctacgggaaatattgtgctgttccgcaatcttcagcgcctgctcaatattatgtacgcgacgggcgaagatagccttagcgacctcttcctgacgtttgacctgcgctttcatctgaatagtacgcgcagcccaggcgcctttcagctcgtcattcagatgactggccgcgcgctggctggcaaaagcaacgtactgacgcaacaggttattggcgtccggcgccgtttccgcaatcagcttcacgctgtcgctaacgttacggagcacatcgccaggcataaactgaatgttattaatcaggtcatccagcagcgcggcatccgctttgctgttaccgaccatacgctgcttgtagtagtccgtctgggaccagaaatcgcgacgtgtatcccacgacgccagctgcatcacaaactctttgtaggattcatccatcaccgaagcctgatccggggtcgccagattggccttgatatcaagattacgcaggaattgctgctgggagtagtagcctccaagcatattcaccgttggtcggtctgtgatcgccgtggcgctccactcttgttttgcaaagaaggtgtaggcaagcgctaacagcgcgaaccccagggcaatccccacaatccacagtttgccctgccataacacgcgaaacaaaccacgaatatccagctcgttctcagtgcccactgatttcgctcccgccaacggttgagtcatcatagtcccggttttacttagttaatgttgtgtttttgccactgttccgacgcatcctgcgttttaaacgtttaataaaacgcgcgactttccatgcacgcttgatgcagtaaccgtacatgaaaaatgctagcaagaataataccaacattacccattcaggaatgaaatgtgcgtattccgcggctacgccaatcgcagccagaatagcagccgcaagcgtaatcaacacaaatgcctgacgagacgtgaagccggcgcgcataatcaggtgatgaatatgctgccggtcgggagaaaacgggctcatccctttacgcagacggcggtacattatagcgaccatgtccatcagcgggatggcgataatccagagagccgttactgggctgatagggtgcgttttaccctgcgtggtttccagcaggacccagataaccgtaaagccaatcagggtactgcccgcatcgcccataaagactttatagcgacgccctaacacacccagattcaggcagatgtaaggcaggatggcggcaatcatggcaaagcaccacattgacaggctgtactggccgtcaaaccataagatgatgccgatagcgccaaacgaaacagaggacagcccaccgagcagaccgtctataccgtcaaccatgttaaaggcgttgatagccgcccacacggcaaacagcgtcaggaagaagccgaatggcccaagcaccagctcccagggaccaaacacgtagcccaggcttcttagatagaggccgcctaccaccatcataatgatgccaatggccgcctgtaccgtcgcgcggaacttcacgctgatatcaaaacgatcatcaagggcgccgaccagtaccagcacaccggcacatgccaggtagagtgcggcatgggggatatagtaatccgcgatcccgaatgtgaaacagatgcctgcgtataccgaaatgccgcccaccagtggaataagcccctgatgacgtttacggaagttcggtttgtccactaacccaattctttttgctaccttgcgcgcaatgaacaaaaaacaggttgtgaataaaaaaatactgatcagctcagttacagcagtgagtagattcacaatggattgctctcaacaaatgttagtcccggaagtataaccatgaagcctctgcctcagaaggattaaagatggctcatcacaactccctttgtatgtttttcaatcaattatttctttgactgtgcaaaccttcttattgtcgcaccgacaggtctaaattgggagtgtgtggtaatagcgtatagtccataaataaaaaacgccacgtaaaaacgtggcgtttactgggattatttgcgttacgagcgtttcatcatgtcgaagaaatcgtcgttcgttttggtcatcgccagtttgttaatgaggaattccattgcgtcgatttcgcccattggatggatgattttacgcaggatccacattttctgaagctcttcctgagtggtaagcagctcttctttacgggtaccggaacggttgtagtcgatcgccgggaagacgcgtttttctgcgattttacgagaaaggtgcagttccatgttgcctgtacctttaaactcttcgtagataacttcgtccattttggagccggtatcgatcagcgccgtcgcgataatggtcaggctaccgccctcttccacgttacgcgccgcaccgaagaaacgcttcggacgatgcagggcgttagcatccacaccaccggtcagtactttaccggaagccggcaccacggtgttgtaggcacgcgccagacgggtaatggagtcgagcaggatgatcacgtctttcttgtgctcaaccaggcgtttcgccttctcgatgaccatttccgcaacctgaacgtggcgagaagcaggctcgtcgaaggtagacgcaaccacttcccctttcaccagacgctgcatctcggttacttcttccggacgttcgtcaatcagcagcaccatcagcacacagtctggatggttgtaagcaatgctctgcgcgatgttttgcagcagcatggttttaccggcttttggcggcgccacaatcagaccacgctggccacgaccaattggcgatgccagatccagcacacgagcggttaagtcttcagtagacccgttaccacgctccatgcgcagacgagagttagcgtgcagcggcgttaagttctcgaacaggatcttattgcgggagttttccggtttgtcgtagttaacttcgttaaccttcaacagcgcaaagtagcgttcaccctcttttggaggacgaatcttacctgaaatggtgtcaccagtgcggaggttgaaacggcggatttggctaggggatacgtagatgtcgtcagggccggcgaggtaggagctgtctgcggagcggaggaaaccaaatccgtcttgcagtatctccagcacaccgtcgccaaagatatcttcgccactcttagcgtgctgcttcaggatggcgaaaatgatgtcctgcttgcgcatacgagcctggttttccagtcccatattttcgccgagagtgatcagctcagaaaccggcgtattctttaattcggtaagattcataatggtgtgggttcttaaactcggggtgattctcgaacttaatgttgtgaatggtatggcagggtcatccatgcctgtttagcggccatcacctcatgtctgttcgctgtctggtcacagggaaagaacgcagaactgaaacgacaagacggattgagtgacaagcccggaatctagcaacttcacgcactgtttaagttaacaacgggaagtatcgggtaaaacaagattcaaacaacaagatatgtttaaaacgtagtcatagctaacttagcacgactaaagccgggcgtccagagctcgccgttaattaggcgttctggacgctcagctgagaaaccttacgccaggttagcgtccaggaactctttcagttgacctttggacagtgcgcccactttggtcgccgccacgtcaccgttcttgaacagcagcagggtcgggatgccacggataccgtattttggcgcggtgcccgggttctggtcgatgttcagcttggcaacggtcagtttgccctgatattcgtcagcgatttcatccagaatcggagcgatcattttgcaaggaccacaccattcagcccagaaatcaacgaggatcagcccgtcagctttaagtacgtccgtgtcaaaactgtcgtcagtcaggtgaataattttatcgctcatatataactccacaggaataagcctggtacgttggttttgtctccaccaacgacgtgttgatgtcgcattaaccaactaaaggttgactttatttcaccggatacgctttcgtaaagcaatagtaagctgatattctaccacactatgagcaaaacacatttaacagaacagaagttttccgacttcgccctgcacccaaaggttatcgaagcccttgaaactaaagggtttcataactgcacgcccattcaggctctcgccctgccgctgacgctggccggtcgcgacgttgcagggcaggcgcaaaccggtactggcaaaacgatggcgtttttaacgtcaacgtttcattatttactttctcacccggcgattgcagaccgcaaagttaaccagccgcgcgcgctaattatggccccgacgcgagaactggcggtacagatccacgcagacgctgagcccctggcgcaagccaccggcctgaaacttggcctggcctatggcggcgacggctacgataaacagctgaaagtgctggaaagcggcgtcgatatcctgattgggaccaccggccgtcttatcgactacgccaaacagaaccatatcaacctcggcgcaatccaggtcgtggtgctggatgaagcagaccgcatgtacgatctgggcttcattaaagacatccgctggctgttccgccgtatgcctgcggtaaaccagcgtctgaacatgctgttctccgctaccctgtcataccgcgtacgtgaactcgcattcgagcagatgaacaatgcggaatatgtggaagtagaaccggagcagaaaaccgggcaccgcattaaagaagagctcttctatccttctaatgaagagaaaatgcgcctgctgcaaaccctgatcgaagaagagtggccggatcgcgcgattatcttcgcgaacaccaaacaccgctgtgaagatatctggggtcacctggcggcagatgggcaccgtgtgggcctgctgaccggcgacgtggcgcagaaaaaacgcctgcgcattctcgacgaatttactcgtggcgaccttgatattctggtcgcgaccgacgtggcggcccgtggcctgcacattccagccgtgacgcacgtctttaactatgacctgccagatgactgtgaagactatgtacaccgtatcggtcgtaccggtcgtgccggcgcaagcggtcactccatcagccttgcgtgtgaagagtatgcgctgaatcttccggccattgagacctacatcggtcactctattccacagagcaaatacaatccggacgcgctgttgagcgagctgccgccacctaagcgccttacccgtccacgctccggcaatggtccgcgtcgttccggcggtgcaccgcgtaatcgtcgtcgttcaggttaaaaaatatgctcagctccacctcgctttatgcggcaattgatctcggttcgaatagttttcatatgctggttgtgcgcgaggtggcgggaagcatacaaacgctgacgcgcattaagcgcaaggtccgcctcgcggcgggcctgagcagcgataatcacctctccccggaagccatggaacgtggctggcagtgtctgcgtctgtttgcagaacgtttgcaggatatcccgctcagtcaaattcgcgttgttgccacggcgacccttcgtctggcggttaacgctggcgatttcattgccagagcacaggaaattctgggctgtccggtgcaggtcatcagcggtgaagaagaagcgcgtctgatttatcagggtgtggcgcacacgaccggcggcgacgatcgccgtctggtggtcgatatcggtggtgccagtaccgaactggtcacgggtacaggcgcgcaggcgacgtcgctcttcagcctgtcgatgggctgtgtgacctggctggaacgctactttaccgatcgaaaccttgccaaagagaattttgacgaggcggaaaacgcggcgcgcgcggtcctgcgcccggtcatggacgaactgcgctatcacggctggaaagtgtgtgtcggcgcgtccgggaccgttcaggcgttgcaggaaatcatgatggcacagggaatggacgagcggatcacgcttgccaaactccagcagcttaaacagcgcgccatccagtgtggtcgtctggaagagcttgaaatagaagggctgacgctcgaacgcgcgctggttttccccagtgggctcgccattctgatcgccatttttactgaactgaatatccagtgtatgactctggcaggcggtgcgttgcgcgaaggtctggtctacggaatgctgcaccagtcggtcgatcaggacatccgtagccgtacgctgcgtaacgttcagcgccgctttattgtggataccgaccaggcacagagagtgagtcaactggcgtcacagtttgccgatcaggtgaaaaaaagctgggatattgaaccgttaagccgcgatctgttgctaagcgcctgtgcgctacatgaaattggtctcagcgtggagtacaagcaggcaccgctgcacgcggcctggctggtgcgtaatctcgatttgccgggctatacgcccgcccagaagaagctgctggctaccctgctgctaaatcagactaacgccgtcgatctctcttcccttcaccagcagaacgctgtgccgccgcgcgtggcggagcatctgtgtcgtctgcttcgcctggcgatcctgtttgccagccggcgtcgtgatgatttgctgccagccattacgctggcggcagacgatgagaaactgacgctgacgctaccggaaaactggcttgaggatcatccgcttggggcggaactgattgagcaggagtaccagtggcagagctatgtgcactgggcgcttgatgtgaagtgaccctttgaagcgtgccgggtggcggcttcgccttacccggcctgcaaatagttatcccttctctttggcttttgccagcatcgcgcgaatgtttgccacgtttgcctgccctttgtgcatacgctcttcagcggtaatgactttacgctcctgctcccagataagatcgtcctgaggcaactccagcagaaaacggctcggctccgggcgcaccagctcaccatactggcggcgctctttgcacagcgtaaacgtcagctctttctgcgcacgtgtgatccccacgtaggccagacggcgctcttcgtcgacgttatcttcatcaatgctgctctggtgcggcaataagccctcttccatccccaccagatagacataggggaactccagccctttcgaggcatgtaacgtcatcagctgaacctgatcggcctcttcttcgctttcgccgcgctccatcatatcgcgcagcgtgaagcgggtgaccacctgcgtcagggtcatgggctcgtcaatctcagatccttcaagcatttcggtcatccagctgaagagctggttaacgtttttcatgcgcatctctgccgctttcgggctggcggaggtttcatacaaccaggattcgtaatcaataccgtggatcagatcgcgtacagctgccaccggctcgcgctctgccagacgctgcacctcacccagccagtgggtaaagcgggttaaggcgtcatagccgcgcccggtcagggtctggctcagccccatatcgaagctggcggtgaacaggcttttgttgcgggtcatcgcccattcacccagtttttgcagcgtcgcagagccaatctcgcgtttcggcgtattcacgatgcgcaggaaagcgctgtcgtcatccgggttggtcagcacgcgcagataggccagcagatccttgatttcgggacgcgaaaagaacgacgtaccgccggagattttgtaggggatgcggttctgcatcagcatcttttcaaagacgcgcgactggtggtttccgcgatagaggatcgcgtaatccttgtattcagttttgttgacgaagtgatgggcaatcagctcgcccgttacgcgctccgcttcgtgctcttcgttgttggcgctgagcactttcagctcggtaccgtaacccagttcggagaacaggcgcttctcaaagacgtgcgggttattggcaatcaggatgttcgccgccttcaggatacgcccggaagaacggtagttctgctccagtttaattacctgcaacgccgggaagtctttgctcagtagcaccaggttttgcggacgtgcgccacgccaggagtaaatcgactgatcgtcatcgcctacgacggtaaagcgtgcacgctgccctaccagcagcttcaccagctcgtactggctggtgttggtatcctggtattcatccaccagcaggtaacgaattttgttctgccagcgctcgcgtacctcttcattccgctgaagcagcagcgtcggcagcaggatcagatcgtcgaaatccaggacgttacaggctttcatatgcgcgtcgtacagaccgtagcagtgggcaaagatgcggtcgcgctcgcctttggcgcttgccgctgcctgggccggcgtcatcagatcgtttttccagttcgagatcgtcgagatcagctgttgcaacagcactttgtcatcttcgatcagcccttccgtcagctctttaagcagcgccacctggtcggtgtcatcaaagagagaaaagttggacttcatgcccagcgccgcgtattcgcgcttgataatatccagacccagcgtgtggaaggtggagatcatcagcccgcgcgcctctttacggcccagcgtctggccgacgcgctctttcatctcacgcgccgctttgttggtaaaggtgaccgccgcgatatggcgcgcctggtatccacaaccccgaattaagtgggcgattttgttggtgatcacgcgtgttttaccggatcccgctcccgccagcaccaggcagggtccggtgacgaattcgacagcttgttgttgtccggggtttaaacgcataaatggtcactcaatgaaagtcgggagaggaggaaaaacgcgtggtagtataccgaccgtaaactagtcgactcaaggcacgatcatggcaaaaacagcagcagcactgcatatccttgttaaagaagagaaactggcacaggatctgctcgaacagattaaaaacggcgccgacttcggcaaactggcgaagaaacactcgatttgcccgtcaggcaaacgcggtggtgacttaggcgagttccgccagggccagatggtcccggcgtttgataaagtggtcttctcctgcccggtgctggagccaactggccctctgcacacacaattcggctatcacattatcaaagtgttataccgcaactaatcaaaagcccggtgcattgactcaccgggctttttatttaggtgttccggcgttcagataccgtcgccgtattcgaaggtgtgatgaataccgttgaagtgctgatccatatccatcgacggcttatcgctgtctggcttaccgacgatgcgcgccgggacgccagcggcggtggtgtgcggcggtacaggctggagcacaaccgaccccgcgccaatcttcgcgccgcgtccgacttcaatattgccgaggattttagcgcccgcgccaatcatcaccccttcacgaattttcggatggcgatcgccgctggttttaccggtaccgcccagcgtaacggattgcaggatcgacacgtcatcttcgatcaccgccgtttcaccaacaacaatgccggtggcgtgatcgagcatgatcccgcggccaattttcgccgccgggtgaatatcgacctggaaggtcacggaaacctggttttgcaggaagatggccagcgcgcggcgtccctcattccataaccagtggccgatgcggtacgcctgtaaggcgtggaagcctttgagatacagcagcggcgtggagtatttatccaccgccgggtctcgcgtgcgcacagcctggatgtcgcaggcggcagaagcaatcatctccggatctgcggcgtaggcctcttccaccacctcgcgaatcgcaatagcaggcatgataggggaagccagtttattggcgagcatatagctcagggcgctgccgagattttcgtgcttaagtagcgtcgcgtgatagaaactggccagcatgggctcacagtcggccaacgctcgggcttcggctttaatattattccagacgatatccagttcttcacacggcattgcttgctccagacgatagttaatgaccagccagttctgcgctggctgggtcattcaggtgacgatacttcccggctaattgctgctgcgctcgtccttgcgcgcacgacctaataaggtcaatgctgcctcgcgcgcattttttccgcaatacaatacctgataaatttcctcggttattggcatttcaacaccgaaacggtgcgccagttcgcgaacttccttggtattgcgatagccttcaaccacctgaccaatcttctcctgcgcgctttttacatcgctgccctgtccgagcatcatgccaaagcggcggttacgcgactggttatcggtgcaggtcagcaccaggtcgcccagccctgccattcccataaaggtggccggatcggcacccagcgcttcgcccaggcgggacatttcggtcaggccacgggtgatcagcgcagtacgcgcattcgcgccgaaaccgatgccgtcagacatcccggccccgatggcaatgacgttcttcaccgcgccgcccagctgcacgccgataaaatcggggttgctgtacacgcggaagcttttgccgcagtgcagcagttgctgaagatcgtcggaaaatgcctggtcggtggacgccagcgaaatcgccgtcggcaagcccgcagccagctctttggcaaacgtcggcccggagatcaccgccagcgggatcgctgttcccagcgcttcgcgggcaacgtcctgcaacagacgtccggtttccgcttccagccccttcgtcgcccacacaatacgcgcatccgcacgcatcagcggcttaatctgacgcaggacttcgccaaacacatggcttggcaccacaatcaaaatattgcggctggccgccagcgcggtcgcgaggtcgctttccagatacagggagtcagggaacggaacgtccgggagaaacgccacattgcagcggtcgtgttgcaacgtcgcgatatgttttggatcgtggccccacaggaccacgtcgtgaccatttcttgccagggtgatggcaagagcggtgccgtaagagccggcaccgatcacagtcattgacgcattaacagtgctcatcaggcatcctgatgttgttcggtaccttcgccagcctgctgctgtagatagttcatgaacagcgcatcaaagtttactggcgcaaggttcagttgcgggaatgtaccgcgagaaaccaggctggtgatgcattcacgggcatacgggaacaggatattcgggcagtatgcacccaggcaatgcgccatctggttgccttcgatgccgccgatggagaagataccgccctgctgaacttcgcacaggaatgcggtttcttcgcccagagaggcggtcacggtgacacgcagtacgacttcatacacatcatccgccagctgggtggatgcggtatccagatcaagtttaacctctggctgccagtctttctggaaaacgtgcggcgcatttggcgcttcgaaagagacatccttggtgtagatgcgctggatctggaaagtcatctcggtgttgttttgttctgacatggaaaaaccctttttaattgtcctaaagtctctagctcagcagcggatcgagtccgccacgagcgtcgagcgcatacaagtcatcacagccgccaatgtgctgcgcatcaataaaaatctgtggaaccgttgtgcgaccactgcgttggatcatctcttcgcgtttaatcgcgtcaccatcgatcggcagttccttgaacgttacgcctttgctggacagcagcgctttcgctcggtggcagaacgggcacgttgctttggtgtagatctcaatattggccatcacttaactccttatttaccgcgcactaaaggaagattctccccgctccagccggagatgccttctttcagcacctttacgttttcaaagcctgctttatgcagtgcgctggcagattcctgcgcctgcatgccagtgccgtcaacaacaataatcggctgggctttatgcttctccagctcaccaatgttgttcgctttaatttccgctggcagcaggttgatagcacctgcgatgtggcccttgcggaaatcgtcgcgctgacgcagatcgacaaccacggcgtcctctttgttgatcagacgtgtcgcttcaccgcgggtgatcaccttaattttagacgtcagtcccttaaatgtggtgaacagtacagcgaccagcaggccaatccacgcgatgctcagaaccgggtggcggctaacgaattgcataatttcttgcatggggggtaacaactcccgactaagtgattaaaaaaaccaggacaggagtatacctgtgcgctgtggcaaatacagccagcgacataaagctaatctattttctgcggcatgccacgtaaaaaaagcctcaaaatggcctgagaacagcattgcccccgcgctttctttgatcttctgcggctattttatcgattcagctgtagtaaaattacgcaaattttttgtctcttgagcatgaggttgtcgcaatgtcggtttctaaaaaacctatggtactggtgattctggatggctatggctaccgtgaagatcaacaggataacgccattttcaacgccaaaaccccggttatggatgcgctatgggcaaaacgtccccacaccctgattgatgcgtctggcctggaagtgggtctgccggatcgtcagatgggcaactctgaagtgggtcacgttaacctgggtgcgggccgtatcgtttaccaggacctgacgcgcctggacgttgaaatcaaagaacgtacattctttgccaacccaacgctcaccggagcggttgataaagccgttgccgcaggcaaggccgttcacattatgggtctgctctctgcgggcggcgttcacagccacgaagatcacatcatggcgatggtagaactggccgccgagcgcggtgcggaaaaaatctatctgcacgccttcctggatggtcgcgatacgccgccacgcagcgcaaaaggttctcttaaagcgtttgaagataaatttgccgcactgggcaaaggccgcgtggcgtccatcgttggccgttactatgccatggaccgcgacaaccgctgggaccgcgttgagcaagcctatgatctgctgaccctggcaaaaggtgagttccagttcccgaccgccgttgaaggcctggaagcggcttacgcgcgtgatgaaaacgacgaatttgtgaaggcaaccgtgatccgcgctgaaggccaggccgatgccgccatggaagatggcgatgcgctgatcttcatgaacttccgtgctgaccgcgcgcgcgaaatcacccgcgccttcgtcaacagcgatttcgacggtttcgcccgtaagaaagtggcgaagatcgatttcatccagttgaccgagtatgcagcggatatcaaagccccatgcgcgtatccacccgcttccctggaaaataccttcggcgagtggatggcgaaaaacgataaaacgcagctgcgcatctccgaaactgagaagtatgcgcacgtgaccttcttctttaacggcggcgtagaagagccgtttaaaggcgaagaccgcatcctgattaactcgccgaaagtcgccacttacgatctccagccagaaatgagctctgcggagctgaccgaaaaactggtggccgcgatcgaaagcggtaaatacgacaccatcatctgtaactatccgaatggcgacatggtgggccacaccggcgtgatggaagcaaccgttaaagctgttgaagcgctggaccactgcgttgagcaggtcgcgaaagcggttgaatccgtgggcggccagctgctgatcactgctgaccacggtaacgcagaacagatgcgtgatccggcaaccggtcaggcgcataccgcccataccaacctgcctgttccactgatttatgtaggtgataaatcagtgaaagctgtggaaggcggcaagctttccgacatcgcgccaaccatgttgtcgctgatgggtatggaaatccctgaagagatgactggcaagccgctgttcatcgtggaataatcgctccccatgaggggaaaggcgattttttcaatcacatgggtcgtgaagccgcttcggttatcagtcagacctctgctttgcgccagcgcactcagcgctggcgtattgctgtgcgccgcatccgcccacgcggatgaccgcgatcagcttaaatccattcaggccgatatcgccgccaaagagcgtgcggtacgtcagcaacagcagcagcgcgccaccctgctcgcccagcttaaaaagcaggaagaggccatttccgccgccgcgcgtaagctgcgtgaaacacaaaacacccttgcccagctcaataagcaaatcgatgaaatgaacgcgtcgattgcgaaactggagcgtcagcgcgatgcccaggagcggaaccttgctgcacagcttgatgctgctttccgtcagggtgagcacacaggccttcagctgatcctcagcggtgaagagagccagcgtggtcagcgtttacaggcctatttcggctatctaaaccaggcgcgtcaggagaccattgcgcagctgaaacagacgcgcgaagaagtcaccacgcaaaaagccgagctggaagagaagcagagccagcagcaaacgctgctctacgatcagcaggcgcagcaggagaagcttgagcaggcgcgcaatgagcgtaagaagacgctcgccgggctggagtcctctatccaggcaggacaaagccagctgagcgaaatgcgcgccaacgaatccagactgcgtaacagcattgcccgggcagaagccgcggccaaagcgcgcgccgaaaaagaagcgcgtgaagcgcaggcggtgcgtaataagcagcaggaagcctcccggaaaggcaccacctacaaaccgactgaaaatgaacgttccctgatgtcgcgtaccggcggcctcggctccccgcgtggtcaggcttactggcccgttcgcggtacgatcctgcatcgctatggcgaacagttgcagggtgagctacgttggaaggggatcgttatcggtgcgtctgaaggtagcgaagtgaaagccatcgccgatggccgcgtgatcctggccgactggctacagggttatgggctcgtggtggtggttgaacacggtaaaggcgatatgagtctttacggctacaaccagagcgcgctggtcagcgttggcacccaggtgcgcgcgggtcaacccattgcccttgtgggcagcagtggcggtcagggccgcccgtcactctatttcgaaattcgtcgtcagggtcaggcggtcaatccacagccgtggttgggaagataggttttgcttcaatttcgtcgaattgttgtttccgtagtcagcgcactggcgctggctgcaccggtttatgcaggcaaactcgcgattgtgattgatgacttcggttatcgaccacactatgaaaatcaggtgctggcgatgccgccagccatctctgtcgccgtcctgcctaatgcgcctcacgcgcatgaaatggcgaccaaagcgcacaatggcggccatcaggtcctcatccatctgccgatggcccccctcagcaagcagccgctggaaaaagataccctgcgcccggacatgagcagcgacgagatcgatcgcatcatccgcgatgcgtacaataaagtgccgtatgccgtgggtctgaataaccatatgggcagcgcgatgacctccagcctgtacggtatgctgaaagtgatgcaggcgctggagcgttacaatctctatttcctcgacagcatgaccatcggcaacagccaggcgatgcgtgccgctcaggggacgggtgtaaaagtcatcaagcgcaaagtattcctggacgactcccagaacgaagcggatatccgcgtgcagttcaaccgcgcggtacagctggcgcgccgtaacggttcggcgattgccattgggcatccgcatccgtctaccgttcgcgttttgcagcaaatgttgtcgggcttacccgccgatattacgctggtgcgtccgagcgatctgctcaatgaacctcaggtggatacttctcgtccgggtagcgcgcaaccacccgcaacgcagccgcgtaatccattccgcggagtgaagaactgcacgctgaaacagccgcctgaaccggtctatgcaacccgcttcttctcggtgattggcgaaagcatcagcagcagtacactggttaaatacgtccagcaacagtggcagggttggggaaaaaaagcctgatcggctaacgcctattctgccagataagagtccgactgctcttttgcaacggactctctcttttcccgatcctgataccaggctttgaaatacttcaaaaaactgtacgccgtggcataaaaccctgtcaccacacctactttgccctgacgccacgcaccgctaaacagataccatttgaaaaatgcgccaatagcgctgatcgcgccgcgaccaagagagggacgtatcgtctgatattgaaccaggcgagtggtatatccgtttaatttattaaaaagttcatgcagcgaatgaaacgtatcatgtctgacataacctggaatacgttcagaacggagaaaaccttcaacctgatcgtctactggccggttattaaatcgcgactgcgtacggttaaaaagacgcaccggataatccggtgatgagacgggataaatcgttcggacattttctcccaaaacaaaccagtgacgacatatccgccacgccatatccggttcgggttcatcgcccatttttaattttaaaatagcatcaacggtttcttgatcgagtatttcgtcactgtccatgcacagcacccagtcgttgtgcgcatgggatacggcatggttcatctgctcgccgtgccagctatattttttgaatataggcgacaatccataactctggcaaatatatatcgtcgagtctgtacttccggaatccactataacgaattcatctgctatttttaaaagaggaggaataacatcgtgcaacgttctttcggagttaaacgttaataagcagaccgttattttaaacatattttcactctctcaataacgacataaaatttttcactcatactatcgaattgagaagaggcgattaaagtcttaaatcgcactttttaaaataagcgcgtttaaaatgtttcttgtaaaaagacaaagaaatacaaaaannnnnnnnnnnnnnnnnnnnnnnnnnnnnnnnnnnnnnnnnnnnnnnnnnnnnnnnnnnnnnnnnnnnnnnnnnnnnnnnnnnnnnnnnnnnnnnnnnnnnnnnnnnnnnnnnnnnnnnnnnnnnnnnnnnnnnnnnnnnnnnnnnnnnnnnnnnnnnnnnnnnnnnnnnnnnnnnnnnnnnnnnnnnnnnnnnnnnnnnnnnnnnnnnnnnnnnnnnnnnnnnnnnnnnnnnnnnnnnnnnnnnnnnnnnnnnnnnnnnnnnnnnnnnnnnnnnnnnnnnnnnnnnnnnnnnnnnnnnnnnnnnnnnnnnnnnnnnnnnnnnnnnnnnnnnnnnnnnnnnnnnnnnnnnnnnnnnnnnnnnnnncaaccgcgacaaattcgacattacctgttgtttttacagggattatagtcgtgctgaaggtcaaacgattggccaggtgctcaatagcattgggatcccgctactcgttatccctcaacgtaagcaaccggcatgggcaaaactactgaaagaagcgggacgtggtctgctgtttttctcgcgttcagcgcgcaaagcatttacgcggcatatcgataccctgtggcgcattcgccccaacgtcagcaagatcgagaccattttcagggagggtggattcgatacgctgtatatgaacaaccagccaggctctaacgaagaagggtatctggcgggcgcaaacctgcatgcgcggataatccagcactgccggattgaaccggtgctgaccccgccgctggtgaagctggtgaatacccatgccacaaaaattatcgccgtctcgcacggcgttgaacgcgtgctacttcagcatggcgtccggcccgagctgtgtaccacggtcaacaatgctatcgacatccaccagcctttgcccgaccgacgcgcgatgcgccagcgcctgaacattgatgacgacacgtttgtgttcggcagcattggctcgctaatccctcgcaaagccaaccaccatacgctggaggcgctggcacagttcagccagaggcacccgcaggcaaaatggaagatggtgctggtcggtgaaggggcggagcgcggcgcactggcggcacaggctgacgcgctgggtattgctgagcacgtcatttttaccggtttccagaacacgccttttgactatctcgccacctttgacgcatttattctggcctcgaagagcgaaggcctgccgcgcgtcgtgctggaggcgatgctgctgaatattcccgtgattggttcaaaggtgaccggcacggcagaattgatcgatcatgagtcgaccggcctgctgtttccctggagcgacgtgtcgcaacttgctcaacatctggataatatctggcaggatcctgctctgcgcgcccggctcgccgctgccgcacaccagaatgtctgcaacatatatgccattgaaagctatgttaacggtgtcgaggccgttcttggcgcgcaataaccaaacgagaagaacatgtttaaattcctgaatgctcgctaccgccacattaccgggcgtcataacattccttacgcttcccttccggtcacgcgcgatctcgttgcggtggattccattgtgatcccgtgtacgggcgcggatttcgtcgaagaggcgttattgtcagcgacctttgcagagcgttatgccaccgacgtcagcgagattgttatcgtcagcgatcagcctgaatccgctttcggcgagctgccgccaaaaacccgcgttgttaccctcacgcttccaaaacgtgaagaaggttaccgctataagcagatctacctcagtcgtctggtgaagcttaacgctccgttgcaggcgcgcggtgaaggtgtgctgatgatcgactccgatctcaacctgcttaaaatgccagagatcaacatggcggatatgcacatctactccagcttccgtcagggcaaaatgattgccaagctggacggcgcgccagcggagaaagtgccggcatattacaaagaaacggtgcgtccgtatctggtcgatcacgttaacggcgcgtttcttgccgccaccaaaaagacctggcgccgtatctgcccgctgtggctgacgctgttccaggatacctgggagctgatggacgacacgcagccgccgaccgatcagctgccgctcgctgcgctgctggacatgctggatgtaaaaacggttaacctcggtgactggatgaactggccggtctccaagaagatcggcggtcaggaagccgttgtgccgaaagaggtgattggcgcgcacggtggtttcccgctttccgaatggcagaagtatctggaatctccggataacaaactgctgttcaaaggccaggattacacccgcaaggtgcgttacctgacggacgaagagaaaaagaatcagtaaaaaaaggggccgctagcccctttttaattacttatcccagctcaggatcactttccctgactggccggaccgcattgcgtcaaagccctgctggaactcatcgatggagaaacggtgagtgataatcggggacagatccagaccggactggatcagcgcggccatcttgtaccaggtttcgaacatctcacggccatagatgcccttaatgaacagccccttgaagatgactttgttccagtcaatggacatatctgacggcggaatacccagcatcgcgatacggccaccgtggttcatggtgtcgagcatggtgcggaacgccggtggcgcgccggacatctccagacccacgtcaaagccttcggtcatgcccagctcttccatcacatcggtcaggctctctttcgagacatccaccgcgcgggtgacgcccattttgcgcgccagcgacaggcggtattcgttcacgtcggtgatcaccacgttgcgcgcacccacatgcttcgccacggctgccgccataatgccgatggggcccgcgccggaaaccagcacgtcttcacccaccaggtcgaaggagagcgccgtgtgtaccgcgttgccgaacgggtcgaaaatggaggccagatcgtcagagatattgtccgggattttgaacgcgttaaacgccgggatcaccaggtattccgcgaagcagcccggacggttcacgcccacgccgacggtgttgcggcacaggtgggtacgcccaccgcgacagttacggcagtgaccgcaggtaatgtggccttcaccggagacgcgatcgccaatgttgaagccttttacttcctggccgatacccaccacttcgccgacatattcgtgaccgacaaccatcggtaccggaatggttttctgcgaccactggtcccagttgtagatgtgaacgtcagtaccgcagatggcggttttacgaattttgatcagcagatcgttatgaccgacttccggctccggcacgtcggtcatccaaatcccttcttccgctttcagtttggataacgctttcatcatacgtcctcaggcaatgacgcccagctgtttgccgatgcgggtaaaggcttccaccgcacgttcaatttgttcaggcgagtgcgccgcagacatctgggtgcggatacgcgcctgaccttttggtaccaccgggaagaagaacccggtcacgtaaatcccttctttctgaagctcacgagcaaatttctgcgcgacaaccgcgtcgcccagcatcaccggaatgatcgcgtgatcggcaccggccagggtgaatcctgcggcactcattttttcacggaacaggcgggcgttagcccacaggcggtcgcgcagctcagccccggattccaccatctccagcactttaatggaggcagccacaatcgccggcgccagggagttggagaacaaatacgggcgggagcgctggcgcagccactcgaccacctctttacgcgcggcagtgtagccgccagacgcgccgccgagcgctttgcccagcgtaccggtgatgatatccacgcggcccattacgtcgcagtattcgtgggagccacgaccgttttcgccgacaaaaccgaccgcgtgagagtcatccaccatcaccagcgcgtcgtatttatccgccagatcgcacacgcccttcaggttggcgatcacaccgtccatggagaacacgccgtcggtggcgatcaggacgtggcgagcccctgcttcacgggcctctttcaggcgcgcttccagctccaccatgtcgttgttggcgtagcggaaacgcttcgctttgcacaggcgtacgccgtcgatgatggaggcgtggttcagggcgtcggagataatcgcgtcttctgcgccgagcagggtctcaaacagaccgccgttggcgtcgaagcaggaggagtacagaatcgcgtcttccattccgaggaagttcgccagcttttgctcaagctgcttgtggctgtcctgcgtaccgcagataaagcgaacggaggccataccgaaaccgtgggtgtccatgccgtttttcgccgcggcaattagctcagggtgattcgcaagacctaaatagttgttcgcgcaaaagttgatcacatggctgccgtcggcaacggtgatgtccgcctgctgggcagacgtgataatacgctcttctttgaacaacccttccgcacgtgcggtgtcgaggtcgctgtttaactgtttgtaaaaatcaccacgcattgcaattctccagactcggcaaattttggcacatattacccaaaccaatagttcatgacgagatgacgcagtatctcttctcgtttttgcagcataaatcacgcgtacccctgctgcatatcggtgaatggctgaagcctgagcattgtgatgatatgataaagagattagcgttcgggatattccccgactcatacttcaaaggttacagttatgatcatcgttactggcggcgcgggctttatcggcagcaatattgttaaggccctcaatgacaaaggcatcaccgacattctggtggtggacaacctgaaagacggcaccaagttcgtgaacctggtggatctgaacatcgctgactacatggataaagaagacttccttatccagattatggcgggtgaagagttcggcgagatcgaagccatcttccacgaaggtgcgtgctcctccaccaccgagtgggacggcaagtacatgatggataacaactatcagtactccaaagagctcctgcactactgcctggagcgtgaaattccgttcctgtacgcctcttccgcggcaacttacggtgggcgcacttcagatttcatcgaatcccgcgaatatgagcagccgctgaacgtttacggttactccaagttcctgtttgatgagtacgtacgtcagatcctgccagaagcgaactcgcagattgtcggcttccgctacttcaacgtctacgggccgcgcgaaggccacaaaggcagcatggcgagcgtggcgttccacctgaacacccaattaaataacggcgaaagcccgaaactgttcgaaggcagcgacggcttcaagcgtgacttcgtctacgtgggcgatgtggcggcagtaaacctgtggttcctggaaaatggcgtgtccggcattttcaacctgggcaccggccgcgcggaatccttccaggcggtggcagacgcgacgctggcgtaccataagaaaggcagcatcgagtacattccgttcccggataagctgaaaggccgctaccaggcattcacccaggcggacctgactaacctgcgcgccgcaggctacgacaagccgttcaagaccgttgccgaaggcgtaacggaatatatggcctggctgaaccgcgacgcataagcatgaaaattctggtgatcggcccgtcatgggtgggcgacatgatgatgtcgcaaagtctctatcgcacgctcaaggcgcgttatccccaggcgataatcgacgtgatggcacccgcatggtgccgtccgctgttatcgcgtatgccggaagtgaacgaggcgatcccgatgccgctcggacacggggcgctggaaatcggtgaacgccgcaaactcggccacagcctgcgcgagaaacgctatgaccgcgcgtacgtgctgcctaactccttcaaatccgcccttgtgcccttctttgcgggcatcccgcaccgtaccggctggcgcggtgaaatgcgctacggcctgctgaacgacgcccgggtgctggataaagaggcctggccgctgatggtggagcgctacgtggcgctggcctacgacaaaggcgtgatgcgcagcgcgaaagatctgccgcagccgctgctgtggccgcagctccaggtaagcgatggggagaaatcccacacctgcaacgcatttggcatttcgtccgaacgcccgatgattgggttctgccctggcgcagaattcggtccggcaaaacgctggccgcactatcactatgcagagctggcgaaacagcttatcgatgaaggctatcagattgtgctgtttggctcggcgaaagatcatgaggcgggcaatgaaattctcgccacgctgagcaccgagcaacaggcatggtgccgcaacctggccggggaaacgcaactcgagcaggcggttatcctcattgccgcctgtaaggccgtggtcagtaacgactctggcctgatgcacgtcgccgccgcgctggaccgcccgctggtcgcgctgtatggcccaagcagcccggacttcacgccgccgctgtcgcacaaggcgcgcgtgatccgtttgatcaccggctaccacaaggtgcgcaaaggcgatgccgcagaaggttaccatcagagcctgatcgacattaccccgcagcgtgttctcgaagaactcaacgcactgctgttgagcgaagaaggataacggatgcgggtattgatcgttaaaacctcctcaatgggtgatgttctgcatacgctgccgtcgctgacggacgccatgcgggccattcccggcatccgttttgactgggtggtggaagaaggcttcgcgcagatccccacctggcatgaagcggttgatcgcgtgatcccggtggccattcgccgctggcgcaaagcatggttctccgcaccgattaaagccgaacgcaaagccttccgcgaagcggtgcaggcccggcgttacgacgcgatcgtcgacgcccaggggctggtgaaaagcgccgcgctggtcacgcgtctggcgcacggcgtaaagcacggcatggactggcaaaccgcccgcgaaccgctggcgagcctgttctataatcgtcgccaccatattgcgaagcagcagcacgccgtggaacgtacccgcgagctgttcgctaagagtctcggctatgcaaaacccgacctccagggtgactacgccatcgcacagcattttctgcgcgaaacggacaaggatatcgcgccctatctggtcttcctgcatgccacaacgcgcgacgataagcactggccggaaacgcactggagaaggctgattgaactaatgcaaccttgcggtatccatattaaactcccgtggggcgctgaacatgagcggcagcgagcggaacgtctggcagcaggtttttcccacgtcgaggtgttacccaaactcacgctggcgcaggttgccgcacagctggcgggcgctaacgccgtcgtttctgtggatacagggttaagccatttaaccgccgcactggatcgtcctaatatcacgattttcggcccgaccgatccggggttgatcgggggttacggtaaaaaccagcatcagatggtcagccctacgcaacaaacgaaggatattagcgcagatgctattttttcatttttacagggcagccatcggctttccaacagggatatttaacccatgagttatgtatttctgctgattttactctttccggtgaaactcatccggaagctgtttcgaaaggacacgggcaagaaccttgtcattcagacagccaaaatcggtgactttattaatgcgacgcctcttctggcatatctgcaaaaaagcgatgtgttgatcagtcgcagcgttggcgcgctggcgaagcatgatgagactattgagcagatctattttattgagcagcataagcgcaacctgtggcgtaaactgtgcttcgcgtgcaggatcatgaaccgctacgacaacgtctacctgctacagcccaacagcgtgaacctcttttttgccgccgtctgcaatgccaaaaacaaacaatttttaagcatttacacgcgcaggtggtatcacgggattttctatctcgcggccgacggtaccgttgagcatggcaaaaaannnnnnnnnnnnnnnnnnnnnnnnnnnnnnnnnnnnnnnnnnnnnnnnnnnnnnnnnnnnnnnnnnnnnnnnnnnnnnnnnnnnnnnnnnnnnnnnnnnnnnnnnnnnnnnnnnnnnnnnnnnnnnnnnnnnnnnnnnnnnnnnnnnnnnnnnnnnnnnnnnnnnnnnnnnnnnnnnnnnnnnnnnnnnnnnnnnnnnnnnnnnnnnnnnnnnnnnnnnnnnnnnnnnnnnnnnnnnnnnnnnnnnnnnnnnnnnnnnnnnnnnnnnnnnnnnnnnnnnnnnnnnnnnnnnnnnnnnnnnnnnnnnnnnnnnnnnnnnnnnnnnnnnnnnnnnnnnnnnnnnnnnnnnnnnnnnnnnnnnnnnnnnnncgccacaaagccactcttcaagccgacgacctggccggccattcttgataaacctggcgttatccgcatcggcatcagtattgcggcgggcaataaagccaaaaccgtccctccggttatctggaagcggattgttgatcaactcgctgatttaccctgcgagttttatgtcttcggcgcgccaaacgaacagtcgtggatggacgatatcacccgtctttacggtgacatccccaattttatcaatcttattggcaaaatttcgctggaagagcttccctgggccatttctaagatggactgctatatcgcgtctgactcggggaatgtctacatcgcagacgccgtcggcgtgccggtggtcctgctgtttggaccgtgttgtcactatgaacagcgtccgcttggcaatgtgatgctgatcgggaatgacgataacatttgttcttatgtgtttgaaacgcgctattacttcccgcaagaacgggaagcgctattctctgtcactgactccgcgttacaagatcttcagcagtttatccgtacattaccaaaagcccgctcactggctagcgctaccgacgctcaaggaaactaatttttatggcttttttaagcgtcattattgctgcgcataacgctgaagctacgctgcacgccacgctttcaagcctgctggcagcaaccgatcaggatactgaagtcattattttcaatgacagttctgaggatgccacgcaggcaataattgaagagtggtcgccgaaatttcctcagatcataacgcgcaccgtgaactttcgtaacgtcggccgggtaagaaacagcgctgtcgcgctggcatcgggtgagtatattacgatgctcgacagtgatgattgcttaaagccgggcagcctcagggacgcaatagccttcctgaaagcgcaacgtccggacatgttactgactcgtttgcttgagattcgcgatccccggaaaataacgtcagactggcagggatttaatcctgtgccattgtcacaacatgaagcaattactcgtttcttacgtcataaagactttcaggcacatctcattggccagtttattcatcgtagcctttacgagaaaaatcccatacctccgatgttatgttatgaggatttcgctgtcttcccgggaatgttgatgcaatcgagcaaaatagcctatcagcgccaggggcattattattacatcaagcgtcgcgacagtttgtcgagcagtctggacgccagcaaaatttcaacgcttgtcgaatgcacgttacagatggaaagaacatttccgtcacgctacaaacatctcgtcaattgccactggtttgatatttacagcaaccatcggtcctgtcttacagaccaacaattgcagctcgtgaaacaacgcgtaaagaccatgtatacattgtcttttttcctgtccaccgatgttcgttttagctacaaaaaaagggttattgaggcgttatggaaaaaataaaaccacggctatatcaactgacgatcgctttaagcctcatctccttgatactggctttagtcagttctgggaagcaaagagagtttttctatatcgctatttacgtcagtattattggcctggctttcgaatataaaaaaatcactctgcgaccttttactatagcgctgcccattctgctgattgggttacttaacctcggctggtacttactctatgagtatcataacgagggcctcaacctttacagcgactacctcggtgccagcaaaaagttaattttagcgagtgtcctgattttctatatcgaccgctttaagttttatatcgataaggataccttcaggaaattcttcttcttcgcaacggccctggggtttgtgctcgccacagggtatggcttgtggcaggcctcgcaaggtatgactcgcgttgagatggcaattaaccgtgccaccgtttcagcttatgtttattctgtcctgtcactggctttcgtatacagtctttaccttcaacagaacgtgaagctgtatgttgttgcgggcttcactatattaatctcttacttcgtcatactgttgacggggacccgcgctgcgatgggtttatatctgcttctggcgattgtgctcacgctttatcatttcagaaagattcatcttaaatcagccctcatctttttatgcattgttgcaggcgttgtaatcgttagctacaagccattgatttcgccaaaaatacaacaaacccaacgtgaggttgaacgttatcaacaaggttttgaccgcacctcactcggcgcacgtttttcgatgtggactatcgggatcgagaatggtcttgcccatccgttagggcaatcgctggaagagcgtgaagcgtggacccgacactacattaaagacggccatcctcaccttggcagtgcactcgaatacatcaaagtccacctgcataatgaatttattgagaaatactctttgcaggggatccccggcgtagcggtaatgctctttttcttcgtttcgatgattgtgtatgccctacgaaacagaaatgcactgctgctgacgtcgatgcttcttttgcttttgtatggactgacagatgtcatactgctcagttcagaagccttaatcttctttatgattttgtttgcgctaagtacacctttctcacaaacaaaacagcaataacaaatatgcccgcctggcgggcataactattttttgtactggtaaaactccgccagcgtcatccccacggtcttatctgataaccaggtaaagagctgctccagannnnnnnnnnnnnnnnnnnnnnnnnnnnnnnnnnnnnnnnnnnnnnnnnnnnnnnnnnnnnnnnnnnnnnnnnnnnnnnnnnnnnnnnnnnnnnnnnnnnnnnnnnnnnnnnnnnnnnnnnnnnnnnnnnnnnnnnnnnnnnnnnnnnnnnnnnnnnnnnnnnnnnnnnnnnnnnnnnnnnnnnnnnnnnnnnnnnnnnnnnnnnnnnnnnnnnnnnnnnnnnnnnnnnnnnnnnnnnnnnnnnnnnnnnnnnnnnnnnnnnnnnnnnnnnnnnnnnnnnnnnnnnnnnnnnnnnnnnnnnnnnnnnnnnnnnnnnnnnnnnnnnnnnnnnnnnnnnnnnnnnnnnnnnnnnnnnnnnnnnnnnnnnnnnnnnnnnnnnnnnnnnnnnnnnnnnnnnnnnnnnnnnnnnnnnnnnnnnnnnnnnnnnnnnnnnnnnnnnnnnnnnnnnnnnnnnnnnnnnnnnnnnnnnnnnnnnnnnnnnnnnnnnnnnnnnnnnnnnnnnnnnnnnnnnnnnnnnnnnnnnnnnnnnnnnngcggcctcgtctttaaaagtagggctcccgccaggcataaattccgacgaatgcagcatgaattccacgtagtcattcccctgagccaggcactgctgcgcaaccttaatcatctccgccgcatttcctccggacggacgtaaccagttaactgacggagaacggtatttaccgcgcagacgatcataaccctgcttcagggaattcagccatgccgggtgtttatactggatgctcatcggcacttcgaggagagggctgtttcccggccgggaaatgtcgtctacgtccaaaaagtaggcacgatcgggaaaatgctggtaattcgttccgcccttaccctgcggggcacctttcgcgttgcgccagttcacgcgcggcgtaacggaacaatctacctgataccccagctcaatcagcaactgggcgtaacggctgtcgaatgcccagcgcccggcgcgatggctgagcatttttgtctggaaagtctcttccagtaagcgggtcatgaagagcactttctcacgcatgacctcgtctgaaaactcaatcagataaggctgccagcgccagtcatcaccggtcagatcgtgctccggagggctattccaggcatggagatgcattcccacctcaccctggccgcgggctatgacctctttcgcgaactcaatgaataccggttcgactgccatctcgtagttggtcagccagacgggcttaaagccgaagcgttcacaaagcgcctgaaaccgcgccaggtagcgcgcgttttccgttttgatcacccggtggttctgccagagattatccccttcggtatcgatcgtgatgataaacgctggttttttcataatgagcccgcaagacaaaatagttagcgctatgttacgcacgcccgaaagcaggagtaaacccttccagggaaattcctgacattatggagaaagagtgcaagtcgttaccaggtctattagaattgccaatagtacaacgccgataagatgatgatgaataacttacctgacacgcctgatttgcgcattttactgatcaaacttcgccatcatggtgacatgttactcaccacccccgtcatcaattcattacgccagaaatggcctgaagcccaaatcgacgtgcttctctatgaagagacgcgagacatgctcgccgcgcatccggcaatcaggacgatctatggtatcgatcgtaaatggaagcagctggggacgctgaagcacctgcaaaaagagtggcagttgcttcgtgctttacgcgctcagcattatcatctggtgatcaatcttgccgatcagtggcgcagcgcgattgttacccgcttcaccggtgcaccgattcggctcgggttcgcttttaacaagcgcaataatgccttctggcgtttttgtcacagtgaactggtctcggtcgccagccatcagtcgttgcacaccgttgaacaaaatctctccatactgtcagcgctgccggtaatggccaaccctaccgtgaccatggcttacagcgcggatgactggcgccatgctcaccaaaagctgtcgcaaaagggcgtgggagaccgctacatcgttattcaacccacttcacgctggttctttaagtgctgggatgaaggcaaaatggcgcaaactatcgccgcgttgcagcaggacggccacactatcgtcctcacggcgggaccggataagaaagagctggcgatgattgaccgcattcttgccgcctccccgcagacgggtgttgtatcactggcaggccagttaaccctgcgccaactggcctcgctaatcgatcacgcgatcctgttcattggcgttgactccgtacccatgcacatggccgccgcccttcagacgccctgcgtggcgctgtttggcccgtcaaaattgacgttctggtcgccatggcaggttaacggagaggtcatctgggcaggtaactacggcccgcttcccaaccctgacgccattgatacaaaaacgacggaacgttatctcgacgccatccccgttgatgctgtcgtctccgccgcaaggagatacctgcaatgaagcttcatcgtctggccattgtgcgccaaaaatatcgtccggatggaggagcagaacgttttgtctccagggcacttaccgcgctgagcaatcaaaatcttgagctcaacgtcatcacccgcgagtggcagggcgaaaagcaggacgactggcatattcatatttgcgatccacgaaagtggggccgcatcagccgtgagcgcggctttgcacacgccgcgcgcgcgctgtggcagcaacagcagtttgatattgtccagagccacgaacgtattccgggctgcgatatttaccgcgccggggatggtgtacatcgacgctggctgctacagcgtacgcgtattctccccgcctggcgcgcgaagctgcttatgcacgatcgctatcaccgctacgtgatgcacgcagaacgtgaaatgtaccaggctcccgagttgaaagccgttatctgtaatgcggagatgatcaagcgcgaaatcgtcgaagactttgatattgacgcaaaaaagatacatgtgatttataattcaatagattccagccgcttcgttccggcagaagagaggcaacgcgctgtactgcgtcagcaatttggcttacccgctgatgccgtcattttctgcttcgtgggttcagggtttgaacgtaaggggctggcaagcgctattcgggctatagcaggaacctcggcgtggctggttgtggtcggtcaggataaagcggaaagccgttatcgcgacctcgcccgttcattaggctgtgaggggcaaatccgtttcctggggatgcaaaaagagacgctgccattttatcagctttctgatggtttactgctgccgacgctgtatgatcctttccctaacgtcatacttgaagcaatggcctgtggattgcccgtcattacgtcagagagttgcggtggttcagaatttattgagcaaggccagaacgggttttactgtgatgcacttgatatccacacattgaaggaggccgtcatgtccatcccttcactggaaaaaaataacaatatggggcttgcggcgcgtgaacgcgtcagagaagcaacccctgaaaaactatcaagtcagcttatttcgctttatcaaaaattactggattaataatgcgcatcctaatgattattgatggtttacccgggggaggagccgaaaaaacggttctcaccctctccagcggactgacagaactggggcatcaggtcacccttttctccttacggaaggtgtgcgactacgccattccggaaggcatcgattttcaggttgtgcaggatacctgtaaaaaaccctggcggaagctgaccgagatcccgcgtcgcgcccgtttgctggatcgcgccatcgagcaggcagaacgcagcggtaaatttgacgtcgtgttctcacatctgcataaaaccgaccgtatcgtggcgcacagccgcgtgctggatcgggataaggtctggttctgcgtacacgggatgttctccttctcctatttgcgccatcgcagcgggatttctcgctggtttaagcattataagatccgtcatacctatgaaaaccgcaacgtggtggcggtatccggcgccgtgctgcacgatctgtctgaagtactcgcgatccccctgcggcgcaaagcggttatccataacccctttgatatccctgaaattcagcgtctggcggaagcgccctttgagatgcaggggcaggattacattatccacgttggccgttttcatgaacacaaacgtcacgacaggctgctgcgggcgtttgcgctgagcaagatcgacgcatcgttggtgttgatgggcaaaggttctgacgcgaaaataaatcagctcaaacagcttgccgctaagctgggaattgaaaacaagatcgtcttccgcccgttcgaaaccaacccctacccgtggatcaaaggggcacgccttttagtgttaagttccgactgcgaaggttttggtaatgtactggtagagtccattatctgtcagaccccaccggtgagtacaaactgccctggcggccctgctgagatccttactggccccctggcgcgtggtctgacagcgttaaccgacgaatcactggcgaaaacactggcagaactgtatgcctctccgccggttgttgatcgcgaaacgatcgcatcgttcggtatcaacgccatttgccagcaatacattgctttggtcgacaaccaaaaataatcaggtttcatatgcaaaattcagcgcctttattaagcgtggtggtggccgtttataacggtgaagcttttctcgatcagttctttacctgccttgtaaatcaacacatcgacagtatggaagtcatcatcgtgaatgacggttccactgaccgctcgatgcagattgtcgaaaaatggcgcgaaaagctgccacagatgcaggttattgaacaacctaatcagggcgtgtccatcgcgcgtaatactggcctggccgttgcgaccgggcagtatctctctttcccggatattgatgatgtcttcaaacccggcatgtaccagcgtctgctggatatggccgtcacgcagaacctggatgtcgccacctgcaatggcaactacgtctgggaaaataacaaaaaaccgtctcgccctatcttccctgaagataagctcgcctcaacgggcgtcatgaatggcgcggcatggttaaaaaaggcgctggattcacgtaagttcctgcatgtgacctggctgaatatctatcgtcacgattttattcgtcagcacggcttccgtttcgagccaggcctgcgccatcaggatatcccgtggacgactgaggtgctgcttgccgcggaacgcgttcagtacaccagcgaacgcttttacgactactacattcactccgcctcggtatcgcacaccccggataatgacgacacgctgattcgctctgcgcgccattatatgaagatcctgaagatgcttgatgccattaaccagcgctacccggataaagtgaaaaatatcccggcctgttactggcaaatcgctaaagagggtctgggaattattcataccttcgacaacatgaaggatgaggcgaagaaatcaatgataatcaaagagttcttcgacaccgggatctggaagctcatctggaaaagtgccaaaagcccgcgtttgcgctggcgcctgggccggcgctacttccgtttaaaacggtatctggcataagagatagctttagcacgtttaaatgcttagaatttcccggccgaaactaaaaaaacggataatcgcttggaattgttgtataccgccctgctctacatcattcagccactggtgtggctgcgactgttgcttcgtagccgtaaagcgcctgcgtaccgtaaacgctgggccgaacgttatggctactgccgcaataaagtggcgccggacggtattctgctgcattccgtgtcagtcggggaaacgctggccgccattccactggtgcgtgccctgcgccaccgttatccgtcactgcccatcaccgtcaccacgatgacgccaaccggctcagagcgcgtgatgtctgccttcggtaaagacgtgcatcacgtctacctgccgtacgatctcccctgcgccatgaaccgtttcctgaataccgtgcgccctaaactggtgatcgtcatggaaaccgaactgtggccgaatatgatttccgccctgcatgcccgtaaaattcctttggttatcgccaacgcgcgtctgtcggaacgctcggcgaaagggtacggcaagctgggtaaatttatgcgtcgcctgctcagcaaaatcacgctgatcgccgcgcagaacgaagaagatgctgcgcgctttatcgccctcggcctgaagcgcaaccagcttgcggtcacgggtagcctgaagttcgatatttccgtcacccctgaactcgccgcccgtgcggtaacactgcgtcgtcagtgggcgccgcgtcgccaggtctggattgccaccagcacccatgatggcgaagaagccattattcttcaggctcaccgccagctgctggaaaaattccctgatttactgctgattctggttcctcgccatcctgagcgttttaaagatgcccgcgagatggtgcaaaaaggcggtttcagcttcaccctgcgcagcagcggcgaaatcccctctggcagcacgcaggtggtgattggcgatacgatgggcgaactgatgctgctgtacgggatcgccgatcttgcattcgttggcggaagcttggtggagcgcggtggtcataacccgctggagccggcagcccacgccatccccgtgctgatgggaccacacacgtttaacttcaaagatatctgcgcgaaattgcagcaagccgatggcttaatcaccgtgaccgacgcggattcggtggtcaaagaggtctctacccttctgactgacgaagattaccgcctgtggtacggtcgtcacgccgttgaagtcctgcatcagaaccagggggcgctgacccgtctgctgcaacttctgcaaccttacctgccgcagcggagccactaatgtcaacgcgtctgtcggtcgtgatgatcgccaaaaacgccgccgacctgcttccggattgcctggcctctgttgcctgggctgacgaaatcgtcattctcgactccggaagtacggacaacacggcggacgttgcccgtgcagccggggcaaaagtctttaccgacaccgactggcagggctacggtattcagcgccagcgtgcgcagggttacgccacgggcgattacgtgttgatgatcgataccgatgagcgcgtcaccccggaactccgacaggccattcaaacggtgcttgccgcgccacagcccggcgcggtctacagtatcgcgcgtcgtaactatttcctgggccgctttatgcgccacagcggctggtaccccgaccgcgtgatgcgcctctatgcgcgcgagcgttatcagtacaacgacaacctggtccatgaatctctggcctgcgatagcgctcaggtcatccctctgacgggcgatctgcttcatctgacctgccgcgatttcgccagcttccagcggaaacagctgaactatgccaccgcctgggcacaggagcggcatacgcgcggcaagaaggccacgctgaccggcatcttcacccacacgctgggcgcgtttctgaaaacgctgctgctgcgtggcggcgtgctggacggcaaacagggctggttactggccgtagtgaatgcccagtatactttcaacaaatacaccgagctgtgggcgctgaaccgcggctactcagagaaaacgtgagccatgagcacaaaagcgatttatccgggtaccttcgatccgatcactaacggtcatcttgatatcatcacccgtgcggcgtgtatgttcgacaaggtgattctggccattgccgccagcccgagcaaaaagccgatgttcgacctgaacgaacgcgtgcagcttgccaccgatgcgatttcgcatctgtcgaatgttgaggtcgtcggattcagcgacttgatggcaaactttgcccgtgaccggcaggccaatatcctgatccgcggtcttcgcgcggtagcagacttcgaatatgagatgcagctggcacacatgaaccgccatctgatgccggagctggagagcgtattcctgatgccctccaaagagtggtccttcatctcttcctcactggtgaaagaggtggcgcgccatcacggggacgttacccacttcctgccggttaacgtccaccaggcgttgatggaaaagctaaagtaaccctacttctggcactgacggcagtaaaacgtggcgcgctgagcgtgcttcgtggcaataatcggcgtcccgcaggctctgcacggctcacccttacggccataaacctgcaactcctgcgcaaaatagcccggcttcccgtcgctttgcaggaaatccttcagcgtcgtcccgccctgctcaattgagcgcagcagtaccgctttaattactctgaccagcagctcgcactcctgcgccgacagcgaggaggccagccgatcgggatggatcccggcggcaaacaacgattcgctggcatagatatttcccacgcccaccaccagcttgttatccatcagccagggtttaatcggggttttctttttcgcgcacttctctttgagataatccgcgttaaacgcctctgacagcggctcaggtccgagatgcgccagcacgttgtgtccttccagctctttggtccacagccatgcgccaaagcgacgcgggtcggtgtaacgcagtactttgccgttactcatcaccagatcaacgtggtcgtgcttttccgcaggcaactcttcggtgaggatgcgcaggcttcccgacatgcccagatggataatgatccagccgtcaggcagctccagcagcaggtatttcgcgcggcgctgcacgctcaggacgggtttgtcgcttaacgcgtggatctcatcggacaccggccagcgcagacgcccgttgcgaacgacagcatgaagaatagtcgcgccaaccagatggggctcaatgccgcggcggctggtctctacctctggtaattcaggcatggttcctccgttgagatgcagaatgcaaaaaaccccgcagttgcggggtttttcaatacaaggagactaaaattatttgattttagcttctttgtacagtacgtgctggcgtacaactggatcgaattttttcagttccagtttttccggcttagtacgtttgttcttcgtggtggtgtagaagtgacctgtaccagcagaagaaaccagcttgattttctcgcgaatacctttagccatgatttatttcctctttaagtacttagtacttttcgccacgggcacgcagttcggacagaactgtatcgatgcctttcttatcgattacacgcatacctttagcagatacgcgcagggtgacaaaacgcttctcgctctcaacccagaaacggtgagagtgcaggttcggcaggaaacggcgtttagtcgcgttcagtgcgtgggaacggttgttaccggtcaccggacgcttgccagtaacttggcagactcgggacatgtctattctccaaaaatcaaattagctcgagcttcgtatggggtatcggcgcctcgtcaggctttacagcccggtcatcgcatagttctattgaactctcgattgccaggcccaaatgccaaacccgagattctcaaaggtggcgtagtatacgctgactcggcggtgtgctcaagtcccgaacagacaaagatcccgatggatcgcgagaaaaggcctaaatccagccacgttcggcaaaagaaatgtactctccgcggccaattatcagatggtccagcacacgaatgtccatgaattgacagcatttgataatacgttcggtaattgctttgtcagctctgcttggttctgcacagccagaggggtgattatgcgcgaggatcacgccggctgcattcacttttatcgcttcccgcacaatttcacgcggatgcacctcaacatggctcaatgttcccgaaaaaaggcgggtatgtttcagtacccggtttttgttatcgagaaagatcaccataaagatctcccgctccagatcggagagctggctttgcagaaattcgcgggtcatatcgggggtgaggatcgggtcttcttcctccatacgcacgttgtaaaatcgccgggccagctcggcaatgccccgtaactgggcatatttcgccacgccaatgccctcaacgtgcgtaaacgcctccagctcagcggtcagcaatccatacagtgaaccgaaatggtctatcagttctttcgccagcgtaaataccgttttccccggcgtgcctgtgcgtaaaaagagcgccagcagctcgtcgtcctttaacaacgtgacgccatgacgcagcattttttcacgcggtagcagcagttcagtctcttccatgcccggcctccttctgtttgccattatgctgccacaggcaaattcggggttcgacgctggcatttcgttcttgcgtaacgcctcgcaaagtgaattaaggacatcatcaccccgttttagggattgtgataaaatgcccgctctctggtgaaacccaacaggaaagaatcatgatgagcctggccggtaaaaaaatcgttcttggcgtcagcggcggtattgctgcctataaaacgccagacctggtgcgccgtttgcgcgagcgcggggccgacgtacgggtcgcgatcaccgaaggcggcaaagcctttatcaccccgctgagcctgcaagccgtctcgggatacccggtatccgacagcctgctcgacccggcagccgaagccgcaatgggccacattgagctggggaaatgggccgatctggttatccttgcccccgccacggcagatttaattgcccgcgtggcagccggtatggcgaacgatctggtaacgaccatttgcctcgccacgcctgcgcccgtcgcggttgtgcccgcaatgaaccagcagatgtaccgcaacgccgctacccagcataatctggacacgctggcctcgcgcggcctgctgatttggggaccggacagtggcagccaggcctgcggcgacgttgggccagggcgtatgctcgacccattgacgattgttgatatggccgccgcccatttctcgcctgtcaacgatctgcaacatctcaacatcatgattaccgcgggccccacgcgcgagccgctggatccggtgcgttacatcaccaaccacagctcaggcaaaatgggctttgcgattgctgccgcggcagccaaacgcggcgcgaacgtcacgctggtgagcggcccggtgtcgcttaccacccctgcgtttgtgcagcgtattgatgtaacgaccgcgctggaaatggaagccgccgtacaggcacatgctcaacagcagcatatttttatcggctgtgcggccgtcgctgattaccgcgccgaaaccattgccgacgccaaaattaaaaagcaaggtgatgaattaacaataaaaatggtgaagaacccggatatcgttgccggtgtcgccgcattgaaaactcatcgaccttacgttgttgggtttgccgcagaaacgaataatgtggaagaatatgcccggcaaaaacgtacccgcaaaaacctcgatttgatttgcgcgaacgacgtatcgctgtccacgcaaggatttaacagcgacagcaacgcattgcaccttttctggcaggagggagataaagtcttaccgcttgagcgcaaagaactcctgggccaacacttactggacgagatcgttacccgttatgatgaaaaaaatcgacgttaagattctggacccgcgcgttggcgagcaatttccgctgccaacgtatgccacctccggctctgccggtcttgacctgcgcgcctgtcttgatgacgccgtagaactggcgccgggtgcaacgaccctgatcccgaccgggctggcgattcacattgctgacccgtcactggcagcggtgatcctgccgcgctctggcctgggccacaagcatggcgtcgtgctgggtaatctggtcggcctgatcgattctgactatcagggtcagctgatggtatccgtctggaaccgtggccaggacagcttcaccattgagccgggcgagcgtatcgcgcagatggtgtttgtaccggtggtgcaggcagaatttaacctggtggcagacttcgacgctaccgaccgtggcgaaggcggcttcggccattccgggcgcaaataaccgcccgacaaacacgcatctcacagcgccataatgcaataacaaaccgcaaacgtcagtttgcgggtcgctgtgtggttgccagcctgacaagtgcttattttcaggggtattttgtaacatggcagaaaaacaaaccgcgaaaaggaatcgtcgcgaagaaatacttcaatctctggctctgatgcttgaatccagcgacggcagtcaacgcatcaccaccgcaaaactggcggcctctgtgggcgtgtcagaggcggcgctgtatcgtcatttcccgagcaaaacccggatgtttgacagcctgatcgagtttatcgaagacagcctgatcacgcgcatcaacctgattctgaaggatgaaaaagacaccagcacgcgtctgcgtctgattgtgctgctgattctgggctttggtgaacgtaacccgggtctgacccgtattctgaccggccacgcgctgatgtttgaacaggatcgtctgcaaggccgtataaaccagctttttgagcgtatcgaagcccagctgcgtcaggttctgcgcgagaagaaaatgcgggaaggcgagggatataatacggatgagaccctgctggcaagccagatcctggctttttgcgaagggatgctctcccggtttgtgcgcagcgagtttaaatatcgaccaacggacgattttgacgcccgctggccgttagtggctgctcagttacagtaacgccatcgccggatggcggctttgccttatccggcctacgaacgggtaggcccggtaagcgtagcgccaccgggcaattgaattatacgccaaactcttcgcggtattgacgcaccgccgccagatgatcagccatctcaggcttctcttccagatacgcaatcaggtctttcagcgtgataatcgacgtgaccttgcagccataatcgcgctccacttcctgaatagcagagatgtcgccgcgcccgcgctcctgacgatcgagcgaaatcagcacacccgcaagcgttgcgccgttagcctggataatctccatcgattcacggatcgcggtacctgcggtgatcacgtcatccaccagcatcacgcgcccctgcaacgcactgcctaccagattgccgccttcaccgtgggttttggcctctttacggttaaagcagtacggtacgtcgcggtcatggtgctccgccagcgctaccgccgtggtggttgcaattggaatgcctttgtacgcggggccaaacagcaggtcaaaatcaatcccggaatccaccagcgcttcggcatagaagcggcctaacagtgccaggtcgcgcccggtattaaacagcccggcgttgaagaaatacgggcttttacgcccggatttcagcgtgaactcgccaaacttaagtacctgcttgttaagcgcaaactcaataaactggcgctgatacgatttcatggatttgctcctttgtcttttcagtcttacaggcaaaaaaaaggcgactcattggtcgccttaaaatcaattttctaacgccgctttctgcgtcgctacaatagattcgattccccctcgggccaacgccagcaaggtgagcagttcttcgtgagtgaatggctcgccttctgccgtaccctgcacttcaatgatgcgaccatcttcggtcatcaccacgttcatgtcggtttctgcggcagaatcttcaacgtattccagatcgcaaagcgcctcgccgttaacgataccaacggagacagcagcaaccatccctttcattgggttggttttcagcttaccggcggcaaccagcttgttcagggcatctgccagcgccacacaggcaccggtaatagaggccgtacgcgtgccaccatcggcctggatcacgtcgcagtccagcgtgatggtgaactcacccagcgttttcaggtcaaccgcggcgcggagcgcacgcgcgatcaggcgctggatctccatagtacggccgccctgcttaccttttgccgcttcacgggcattacgggtatgggttgcgcgcggcaacataccgtattcggcggtgatccacccctggccctgacctttcaggaagcgaggcacgccctcttcaatggacgcggtgcaaagcaccttggtgtcaccaaactcaaccagcacggagccttcagcgtgttttgtatagttacgggtcagggtgacgggacgcacctggttggcgctacgacctgctggacgcatgatggattctccggcttgaaacgaatgtggctgcgcattatacggataaaggacgcttattcctatcctgagaagcccctgaaagctataatccccccatctctcctttaaaaacgggaatgtctatgatccgcagtatgaccgcctacgcccggcgtgaaatcaagggtagctggggtagcgctacctgggaaatgcgctcggtaaaccagcgctatctggaaacgtatttccgtatgccggaacagttccgcagcctggagcctgtggtgcgtgagcgtatccgtacgcgtctgacccgcgggaaagtggaatgtaatttgcgttttgagcccgatgccagtgcacagggcgaactgatcctgaacgaaaagctggcaaaacagctggttaatgcggcgaactgggtcaaaatgcagagcgatgaaggcgagatcaacccggttgatattctgcgctggcctggcgtgatggccgccggagagcaggatctggacgcgattaccgctgaaatcctggctgcactcgacggcacgctggacgactttatcgttgcccgcgaaaccgaaggccaggcgctgaaagcgatgattgagcaacgccttgaaggcgtgagcgccgaagtcgctaaagtgcgcgctcatatgccagaagtgctgcaatggcagcgtgagcgtcttgtcgccaaactggaagaggcggaagttcagctggaaaacaaccgtctggaacaagagctggtgctgatggcgcagcgtgtggacgtggctgaagagctggatcgtctggaagcgcacgttaaagagacctacaacattctgaagaagaaagaagcggtaggccgccgtctcgactttatgatgcaggagttcaaccgcgagtcgaacacgctggcgtctaagtctatcaatgcagaggtaaccaattcagcgattgagctgaaggtcctgattgagcagatgcgcgagcagatccagaatatcgagtaattcctttcagggtggtgttgcctcgcacaccacccattactttttctaatccttatttagccttactttcttttcctcccgccttatcacaagcccgccaggcatgcgttgataaatttctgtagggcaaaccccctcgccttagaaaatctcaatcgtgatcttccgcacaaatcgctaatctcctcctcttcattccggagggtttatgctgcttcacattctctatcttattggcattaccgcagaagccatgaccggcgcgctcgctgccggacgtcgccgtatggacaccttcggcgtgattattattgccacggccaccgcgctcggcggcgggtccgtgcgcgatatcctgcttggccattatccgctcggctgggtaaaaaaccctgagtacgtcattatcgtggcaacggcagccgtgctaaccacgattgtggccccggtgatgcctcatctgcgccgcgtgttcctggtgctggatgcgcttgggctgattgttttttccatcatcggcgcgcagatcgctctcgatatgggtgaaggcccggttatcgccaccattgctgccgtgatcacgggcgtgtttggcggggtgctgcgggatatgttctgcaaacgtatcccgctggttttccagaaggaactgtatgccggcatctcctttgccgcggcagtgctttatgtcgccttgcagcactatgtcaccagccacgatgtggtggttatctccaccctgctgtttggcttcaccgcgcgtatgctggcattgcgccttaagctgggccttcccgtttttcattacaaacacaatgcgcattaatgtcagaacgggcaggcgccggataatcagttactcgagtagttgtaaccgtagtgatgatagccgtagccgtaagcgttgcttgcccgcttaacgacgccgttgagaatcacccctttggtattgacgccactctgctccagacgctgtacacagaccagcatctccttcacgctgttcatcccgaagcgggcgaccagcagcgtggtgcctgcgcgacggccgacgacagccgcgtcggtgaccgccaggatcggtggcgtatcgataatcaccagatcgtagcgttcattcgcccagtccagaagctgctggaaacgcgtatgcatcagaagctccgccggattaggggggatctgcccacgcacgatggtatcgaacccgcctttatcgaaggtctgaacgccctgggtatactccgccttaccggacaacatctccgataagccgcaggtattgtcgagcttaaacagatcatgggcatacccgcgacgcatatccgcatcaatatagagcactttctggcccgcctgcgccacgacggccgccagggtactgctgacaaaggttttaccgctgtcaggcgtggcgccagagatcatcagtatattgttcgctgactccatcatcgcaaaatgcagactggtgcgcaggccgcgaatcgcctccacggagagatcgaccgggttatccgccgccaggaaggggatatgtttggtcttatggcgcagccctgaggacataaagtcttttttgcgcaaacgcatctttttagccagccattccgacagcggtacggtggcatagacgttaatcccatgctcctccagctgctccggcgtttcattgcccatacgcagcatactgcgcgccaggatccagcccacagagacgaacagacccaggagaacccccagaacgacgaccagcgcttttttcggcttgactggctgcggccgggtcacggccggatcgataatgcggacgttaccaattgcgctcgaccgggcgatgctcagctcctgttcgcggttaagcagctgctggtagataacgcgtcccgactccacatcacggctcaggcgcaacacctcctgctgggttgacggcatggacgatacccgtttattcaggcggtttttttcctgctccagcgtctggcgtttctcaatcagcgcccggtaggtggggtgatcttttttgtagagctgcgaaatttccgcttcccggaaggtcagttcattgagctgattgtccgcatttacaatctgctccagcaccgcttttgcctccaggttcaggtcaacggagtcattttgctggcgatagcggttgagcttctcctcggcctggtccagctcgctgcgcacctgcggaagctgctgcttcaaaaattgcaggcttttcgcatcctgcgccgcctggcgagccacgttctgttgtaaatagttatcggcgatgcagttaagcacgcgcgccatctcatcgggatcttcccccgtgatggtcaggccaagcatcccactgtccttactgcgctcgctcacggaaaaacgcagctgtagcgcgtcaatggcctccagctcgctctgctgtgtaatcgtaaattgcgtacccggcttcgcctggatagcggcaatggtaatggcgatattcgccgcgctcagcggctgtcccacgacgccctgtaacgtcacgttatcgccttccagctgatagtggcccttctcgccgacggtcagcgtcagcttttgcgcccggcccgcgacagggggaagattgagcatacggatatcgacgatgccaggctgtcgcccggtgagccgcgcccagccgcgtccgacaaggggaaaatagttttcacttacctgcgtgcgcaggttcaggtcatcaatcgttttaccgaggatcatgcgcgactggagaagctgaagctccggcgccgactcaggcgaggagtcagggatgaactcgctaaggttactgagtagcgcgttgccctgcttctgctccacctgtatcagcgcatcggcctgataaaccggtgtggcaaagagcgcataaagcagtgccgccagcgtgaacagcgcggtaaggatgagaataaattttcggtggtcgagcagctcacccaacaggcgcaccagatcgatctcgttattcgcggcagacgcatcatgggcgtgaaggttatttgttgacataaaacgtaactatcccgtgtgattaactgagccgtttcgcccattccagactggcctgctccagcagcccataaacatattcaaatgcgtcccggtttttacggtaggggtccgggatctcttttctgcccgtccagtgaccaaagagcatcattttgccccgcgcctccggtgcgatagccgtgacctgctcgatatgttccagctccatcgccagaatcagatcgtagtcgcgcaccatggcgggggtgagcctgcgcgccacgtggccctcaagcagggtgccgcgttcggcggcgatctctgtcgcctgtgaatcggcggtgcgcccttccaggccacacgttcccgctgaatcgacccgggcggcgggaagcagccggcgcagcagccgttccccaatgggagagcggcagatattgccggtacagatcaccaggatggcgttaaacgttagtttggccatgttctgatatatctccctgtttcagtcaggtcatgtacgccggtaatggtcggcacaagctgagagatcacgcggttccagcgcaccagcggcgcggtggtgacatagacgatgtcgtaaggctcaagctgaaattcggtgctcaacaccatcgcggtggcatcccgggcgttaagctggtagacgttggcgattttgccgttctgcttgccctgcaacggacgaatcacaaagatccctgtggcgtcggccatatcctgatttacgccctgcgcattacccagcgcttccgccagcgtcatgccgctacggtccatcttcagggtgctctgtttacccacctcgcccatgacaaacactttcaggtcgtcattacggggaatgaagagaatatcgcccggatagaggagtttattctgggtgagatcgccgcgctgcatcagcgcgtagagcgaaatgtgcgtgtcctggccgttgtgggtcagcaccacgtggcgccagtccgcctctgacgtcaggccgcctgccgcattgatcgcatccattatggtcagcggaatgttagtgatgggctgctggcccgacttagccacttcgcccgtcacgtaggctttttgcgagcggaacgccgcgacgctgacatccacctgcgggctctcaatcaccgagtccagccgggcggagatctcatcgcgcacctgggccagcgttttgccgacgacgcggattttgccgatataggggtagaagatcgtgccatcggcattcacccagttgcccgtatcgctggcgctacggtactgacctgcgggggtggtcagctccgggtggtcccagacggtaaccatcagcacgtcgccgacgccgatacgatattgatagttctggagctggcgatccagttcaggattcgcgcgggagtcgactttgccaggcagcaactgctccaccagccccggcgtgagcggatagacgttgaccatcttattcagatcgtaattgctgtcaggcagatcgataatatctttgccctgggtgctaagtccctggcccggtacgatagtacaaccgcttagcgccatcatagccaacgcaagcacggaaaatttaacgtttttcattcaggaaaatcatctggttaagtaatgcctgtttcatccggtactactgccctaccggggtttcgcgttctgacgtcatgtcatagagctgatatttacggcctaacatctggccgccatcacgcgtgagaggcgtccacgagaccaccgcccggttgcgatttgggccgatcgtcatcagatcaagcgggatcgagatgtagaagcctttgctaaagccaccttcgccataatcctctttcgagacgttggtcagcgccgcccagacgcctaccgtcacgccgctgtcgaatcgcttcgcgacgtcgagggtggcgcctttatccttcgccaggtactgcccgacgctcagcttcatcagcacactgttgagcttcgccgggttccagtaggcggtgataaatccggttggcacgctgtagtcggtgaagcgcatcatgtcgtcccagtcgcgctgcttgacgtagttcgcatccacgcctagcgcccagtcgctatccagcgggcgccagagcgcctctgctcccacgccgccgtacatggtttcgaggtagccgccataaatctgggcatagaagtcgttccccagcgcatcgacatagttggcctgtaagttgttgatgtagacgtcattgctgacataatcgcgaatatgggttctgacgcgcggcaggctggagtcagcgggaagtagcgaggatttgaacttgtcgtagttgttatagaggttggcgaacacgccgccgtcgagcagcagacgatcggtcagccagtagctggcgctggccatcacccccacctggaacatatagaaatcttccggaccgcccagcgactgcgccagcgtcggtttgaagctgtagctgaagcgatcggcgcgaatacggtagccgcgcccgaacgctgtagtatccacaggctcgacgcgctgctgtctgagcgcctcctcctggccgagcggctgtcccgccagctgtttgcgcaggctggtgacatcggtttgcgtcgtgaccagcggcagatggtcacgccgctgggtgatagcgatcgtgtcgaccccgtcgggcaggttattgatcagaatacggttggcgcgatccaccgcttcgcgcggatcgcgatagcgatactgttcgccggtcatgtataaggtattgccgtgctgaaggatctccggcgcatcgaagcctgcgttgtacttaagcgcggtgagctggtttgccgccgaggtatagtccagcgtctcgcctgccggtgccggttgccaggccggtttcgggttatcacgcagcgcggggcgcagatcgttaaaattggtccgcagggtgaagccaaacatcagcgtattgccgcgctcgtagctgaggttgagatcggcccagtcggcaacgcgatagactgcccccacgttgatatggctcgactgcttaatggagccggcaaaatcatcggcataattgttgccgtcatactcgagcttcaggcgcaggggctgccagggcgtctgatactggaggccgccaaacagcgacgtcggaccacgaaacatatcgctaaagctgatatccccggcatcatgtgattcgccgcgggtgcaatacttattgttgtcgtggcacagcgggttacccacgttgtcgctattaccgggatatccccaggctattccaaaggtaaaatcgaccggtccggccattttactggcaaccagatattcaccgtcgaacaggccggtgcccgcaatatcgcgcttgccgagcgccacctgcggcaggctatagtcctcttcccacagacgaaccttaaaatcgaacgacttatccttgtaactttgatcgccgctgaaatcctcgtcgctgctatatttgcgggtgcggacgtcggtataacgaatcgtcccttccagccacggaaagagcacgaccgaagaggagtaaaaacgatactggtcgttatcgcggtagttgacgctgaattccccttcccgaccaaagcgcgcgtcgggcatttgcatcaggccggtgccgccaaagtcggactgtgaaggtccggtcggatcgggccaggtacgcagttccgcgtggcaggcagaagagatcgccagagcaaggccgctcagtaaaaaaagtttgttcatcagtcaggtatccgccgcgtcaggagcgcaacgatttgctcattcagaccggtaaaatcgtccggcaccgcccggggatcaaaccccacccacagaacagcgcccggctctgcttcaatatggcgtgcgttccagtacgccaccggcgcaacaaccgtactgccgtcaggatcgataacggtcacgttattcctgtcggcgccagccagccgcagctgcccctgtaagtaatccctgatgcttgcgcccggacgccaggccagtttccccggtgtggcgaccgcccccatcagcgtgacggtgcggggcgcaggcgagacccacagatcgtaacggccctcaagggaacgatcgccgcgggcgtcggtacgcacggcgtctggatcgaggctgataaactgccgcccgacgatccgcagggagcgggtctgtgtagcgacagcgcgaatggtcgcgatccgctcgtcatcggcgcgattctgccaggctgaaagcgacgccagcacctgctgttgcgtctgttgcgctcgccgcgtggcggaaggggttgcgatgacagcgccctgccaccagacgttgttcagctgcggctgggtgaccagccgggagagcgtatcggcctgtccagcagaccacgttttgcccggctgatgcacggtaacgacgcttgcgcataaggcgggcaggctgaagagagatagccctacgccaggtaaccattttctgagtctgttcatggggcgggcttcaacatcgtcatggcgacagggaatacgcccgcgccgagcatctgttcgctctggcgtacctggccggtggcggaatcaatccagaaggtgttatgccagcgacgatcgaggccgtcggcctgcaccgtctcctgccagacctgacaacgtagcgtgtttccggcaagggtcaggttttccgtcccgctcagggagaagcgcgaggtcaggtgtgcggagcgataccgcccctcttcctgccagcgcacatcacgcgaccactggctgccgtcgcggagctgcggcgtgtggcgcagcggatcgtgctcaaggttggttacctcaagcaggttataagggagcttgagcgtgtggataaggcgaccgttatgcgtgacgatcatcgcattatcctgcgataaccacttactgtttccctgctcgatgtatccgagaaccaccaggatcctcgggccattatccagacgcaggtacatggttgagtatgggagcacctgaatctgcccgtccgttaccgtcacatcctggcgcccgtccaggctggcgttaaaggtctcaataatgctctgctggctcggcgtacatccctggatcagcagagtcatgatgagcagaataaacagtctcaccagaaatccttgattaaataacattgaaatcaattaaatacccggctttgatatcgccaccgggtcaagtcgttgcgctgttcagcgcaaggctatatcgccttgcgcaccagccttagcgggtaactgtcgtcgtggaagtaccattgcctgagtcatcgccactgtcgcttaccgcgacaacggctaacgtcgctacgccggaaatcgcagcggtggtgacaacagcggttgtcccaatcgcgcctgccgccagtccccccgtagtgccagcggtagttcccaccgttgctccggttgttgtaccggttgttgctgcgctggtgctacctgcttcggtggtagcgcctatagcaggcagggcagtcgccagcgtgagtgccgtcagcactgtacaaagcgtccttttcatttttggtcctcattcaaatgaaggaaaatatgagcacctggaaaccaggtcccggttaacgggcataaagcccggggctgaattccggcccgacagggacggaaaatcatccatgtaaaagccctgggctctgaacaccagcgcatataaaccgccaggatatatttcggtacccttaattgcttcaattggagttcagatagttaactccctcacgaggtgcaaaaagaaaggaaaacgcagaagtgatgcgaaatgcaccccagcggtaactaccttaaaaatttttgataagataattcttataatattttgacgcaatgatttccggcagaataaatatgactaattgttaaccagaaaacactcaacatattattaataaaataattaacaaactgaaattaaaagcaaaaatacgaacaatactcagactgcattgcctataactccttcattcccggctattgctctcgattaatagtgattgagatcaattaaggcgttctctcaaagaaaataaaaacgcaagcagagcaaattctgaaactgggttcagggataacatttcctcaaaatatatttaccatgaataattcatttatattcataattattgcgtatataaaccgcgtctcataaatacgctattcacggcagcggaagtgtgccccttcgccagtctgttcaggagcgcacgcagattaaaatccaccgatgtgctctgcggccagccattttgccagggcatcaatctgaggctgatgcagccagtttacgatctggcgggccttctcctgcccgacacccggcagcatccgccactccgcttcgcttcgctgaatcagcgcctgccaggtgcgatcccctgccgccttgagcgtcgaccgggccagcggtattcccatcgcggtgatccagcggataaaaggtcgctcccgcgccaggttaaactgatgccacagcgcagcgccatgcgatgccgatatccccgccgtcgcggtgagctgcgcctgcgtgagctgtagccaggagaagaggtgctcaaaccgatgcgcctgatagagggtccgccatcctgattcgcccactccttcgatatctaacgcctgcctggaacttagccacgtcagccgggcaaaaaattgctccatgcactccggggaggcatagaaacaggttaagccgttatagcgcgatgagggcggctgcggtttacggcgatccacattgcgccacaccacgttatccagccggggaataccttgtcccgccaggcttaccagcacctgatcgccgggggcaatatccagcctctgccagcggttaaccgaccctaagctgacgcgctgtacacgtttatcgtcgagcatcagcggctcaagctgcgcaatcgcggtgatccgcccggtacggccaacggtaaagtgaatcgctttgacttccgtcacctgggccacaggaaggtatttccatgcgacgacccaactcccttcccccggcagccatcgctcgcccggcggctctgccgaggcgcgaaccacaatgccatccgtggcgaagggcaacgaagccttaaaccaggccgtccgctgcgcctccacatcagccgcgtttttaaccggcacggtatagcgggccgtcagggtaaaacctgcctccgccagcgtggaaaggcgtgctttcatcgcttttgggccgtccggccaggcccagataaaaatgcctgtctgcttcagcgctgcgcgatcggtcgcgcgcatcatcgctcccgctaccttcgcacgcgcgttcatccctcccatccgctgctggatatgcccctcgcgcagcagaaaaagttcaccctgcaacacgctgttggcaagcggcccggccagcgtttgcggaatagcggggatcattcgcgcctgtgccgtccactcttccccctgtaagccgtcgccccggctaatcgcctgcaccagcttgccgtttttgtagaccagggtgaccgcaacaccatccacctttggctgtacccagagatcctgctgcgtcgccatccagcggctaagcgcctgcttgctttctaccttatgcacgccggtatgggcgaagggatgtttcaccgtcccactggcagctggaagatcgtcgtgcagcggttcatcgtgaaaacagcgctgccactgttttaagcgggcgttaagcctgtcgtaaacgtcgtcgctcacctcgctgctgccctgcttccagtaatcatcattccagcgggtcagctgcgccttcagggccgcgatctcctgcccggctttagccggtgaccagaccgggcagattgccatcgccccgctgcttaagaagatcatcagtatgcttatccatttcaccattattacccctccctgttttgcgaagggtataccctgcccgggagccgcagaccagctgcaaaattgcattttacgagcgcgcttcagcgcattgtttttattgcagcaaaaagaaggtaaaagctgaaaacggcacgcaaaatttaatcatccaggggaaaaagtgtgacaaaggctacgtcacacagcggcgacgtgtataataagcccgtatgtaggacttcttcgttaacacatacaaaagactctcatggctcaaggcacgctttatattgtttctgcccctagtggcgcgggtaaatccagccttattcaggcactgttaaaaacccaaccgttgtacgatacgcaggtttctgtttctcacaccacgcgagcaccgcgtccgggtgaagtgcacggtgaacactatttctttgtgaatcacgacgaattcagagcgatgattggcagagacgcgtttcttgaacacgcagaagttttcggtaactactacggtacttcgcgtgaaaccattgagcaggttctggcgaccggcgtgaacgtgttcctggatatcgactggcagggcgcgcagcaaattcgtaagaaaatgcctgattcgcgcagtatctttattttaccgccatcgaaagatgaactggatcgccgcctgcgtggtcgcggccaggacagcgaagaagttatcgcgaagcgtatggcgcaggcagttgcagaaatgagccattacgcggaatatgattaccttattgtgaatgatgattttgatgccgcgctgagcgatctcaaaactatccttcgcgcagaacgtctgcgtatgagccgccagaagcagcgacatgacgcattaatcaccaaactgttggcagactgaacccactttcagtatcatgcccagtcatttcttcacctgtggagcattttaagtatggcacgcgtaactgttcaggacgctgtagagaaaattggtaaccgttttgacctggtgctggtcgccgcgcgtcgcgctcgtcagatgcaggtaggcggtaaagatccgctggtaccggaagaaaacgataaaaccaccgttattgcacttcgcgaaatcgaagaaggtctgatcaacaaccagatcctcgacgtgcgtgagcgccaggagcagcaagagcaggaagccgctgaattacaagctgttaccgctattgctgaaggtcgtcgttaattaaacctgcgggtcgcccttgtatctgtttgaaagcctgaatcaactgattcaaacctacctgcctgaagaccagattaagcgtcttcagcaggcgtatctcgttgcacgtgacgctcacgagggccagacacgttcaagcggtgaaccctatatcacgcacccggtagcggtggcctgtattctggccgagatgaaactcgactacgaaacgctgatggccgccctgctgcacgacgtgatcgaagatactcctgccacctaccaggacatggaacagctgtttggcaaaagcgttgccgagctggtggaaggggtctctaagcttgataagctgaaattccgcgacaagaaagaggcgcaggccgaaaacttccgcaagatgatcatggcgatggtgcaggatatccgcgtcattctcatcaaactggctgaccgcacccacaatatgcgcacgctgggctcacttcgcccggataaacgtcgccgcatcgcccgtgaaaccctcgaaatttacagtccgctggcgcaccgtttaggtattcatcacattaaaaccgagctggaagagctgggttttgaggcgttgtacccgaaccgctatcgcgtgattaaagaggtggtgaaagccgctcgcggtaaccgtaaagagatgattcaaaagatcctctctgaaatcgaagggcgtttgcaggaagcgggcattccgtgccgcgtgagcggtcgcgaaaagcatttgtactctatctactgcaaaatggtgcttaaagagcagcgttttcactcgatcatggatatctacgcgttccgcgtcatcgtccacgactcagacacctgctaccgcgtgctggggcagatgcacagcctgtacaagccgcgtccggggcgcgtcaaagattacatcgccattccaaaagcgaacggatatcaatctttgcacacctccatgattggcccgcacggtgtccctgttgaggtgcagattcgtaccgaagatatggatcagatggcggagatgggtgtcgcggcgcactgggcttataaagagcacggcggcgaaagcagcaccaccgcgcaaatccgcgcccagcgctggatgcagagcctgctggagctgcaacagagcgcaggtagctcgtttgaatttatcgagagcgttaaatccgatctcttcccggatgagatttacgttttcacgccggaagggcgcattgtcgaactgcctgcgggcgcgacaccggtcgacttcgcttacgccgtgcataccgatatcggccatgcctgcgtaggtgcccgcgtcgacaggcagccttatccgctgtcgcagccgcttttcagcggacagacggtggagatcattaccgcgccgggggcacgtcctaacgccgcctggttgaactttgtcgtgagctcaaaagcgcgcgcaaaaatccgccagctgctgaaaaacctcaagcgcgacgactccgttagcctggggcgtcgtctgctcaatcacgcgctgggtggcagccgcaaactggcagagatcccaccagaaaacattcagcatgagctggagcgtatgaagctcgcctcgctggatgacctgctggcagagattggtctcggcaacgccatgagcgtggtcgtggcgaagaatctgcaacaaggcgaaacgacagccgttcctgccaccacgcaaaatcatggtcacctgccgatcaaaggcgctgacggggtgctcatcaccttcgccaaatgctgccgtcctatcccgggcgacccgattattgcgcatgtcagcccgggtaaagggctggtgatccaccatgaatcctgccgtaacatccgtggctatcagaaagagcctgagaagttcatggcggtcgagtgggataaagagacggcccaggaatttatcactgaaatcaaggtggatatgttcaaccaccagggtgccctggcgaacctgacggcagcgatcaacaccgcctcatccaacattcaaagcctgaatacggaagaaaaagatggccgcgtttatagcgcctttattcgcctgaccgcccgtgaccgtgtgcatctggccaatattatgcgcaagatccgcgtgatgccggacgtcattaaagtcacccgtaaccgaaactagcattatgaattcaaaacgttacgagcgaatctgcgaaatgctcgccaggcgtcagcctgatctgacggtctgcatggagcaggtccataaacctcataacgtctctgctatcgtccgcaccgcagatgccgtcggcgtgcatgaagtccacgccgtctggcctggcgcacgtatgcgtaccatggcctccaccgccgcaggcagcaacagctgggtatccgtgaaaactcaccagactattggtgaagcggtctcgcacctgaaagggcgtggcatgcaggttctggcaaccaacctctctgctaaagccgtggatttccgtgagatcgactacacccgtccgacctgcattttaatgggccaggagaaaacggggatcacgcaggaagcactggatttggccgatcgggacatcatcattccaatgatcggcatggtccagtcactcaacgtgtcggtcgcctcggcgctgatcctgtatgaagcgcagcgccagcgtcagaatgccggaatgtacgagcgcagcaacagcatgctgcctgaagaggagcagcagcgcctgctgtttgaaggtggctatccggtgctggctcgcgttgcgaagcagaagaaattgccttacccccacgtcaacgcgcagggcgaaattgaagccgatgccgagtggtggtccaccatgcagtacgcggggtaaatcatgaaaggccgcctgctggacgccataccgctcaacagcctgacgggcgtgggcgcggcacaaagcagtaaactggcgaagataggcctgcacaccgtgcaggatctcctgctccacctccccctgcgctacgaagaccgtactcagctttataagattggcgatctgctgcccgctatttacgccaccgttgaaggggaagtgctgaactgcaacatcacctttggcggacgcaggatgatgacctgccagatcagcgacggcaccggcattctcaccatgcgctttttcaacttcaatgcggcaatgaaaaacagccttgccactggacgacgcgtacttgcgtacggtgaagccaaacggggcaaatacggcgcggagatgatccacccggaataccgcgtgcagggcgatctcagctcacctgagctacaggagacgctcacgccggtctatccaaccactgaaggcattaagcaggctacgctgcgcaagctcaccgaccaggcgctggagctgcttgatacctgcgccattaacgagctgctgccgccggagctggcgcagggcatgatgagcctgccggaggcgttgcgcaccctgcaccgtccaccgccaacgcttcagcttgttgatttagagagcgggaaacaccccgcccaacggcgtcttatccttgaggaattactggctcacaacctgagcatgctggccctgcgcgcaggtgcgcagcgcttccacgcgcagccattaagccagcgtgatgagctcaaagataagctgctggcctcactgccgtttaaacccaccggcgcccaggcgcgggtgactgccgagatcgaacgcgatatggcgctggatgtgccgatgatgcgcctggtgcagggcgacgtgggttccgggaaaacgctggtcgccgcgctggccgctttgcgcgccatcgcccacggtaagcaggtggcgctgatggcgccgacggaactgctggccgagcagcacgccaacaatttccgtaactggttcgccccgctgggaattgaagtgggctggctggccgggaagcagaagggcaaagcgcgccttgcgcagcaggaagccattgccagcgggcaggtgcagatgattgtcggcacgcacgccattttccaggaacaggtgcagtttaacggcctggcgctggtcattatcgacgaacagcaccgctttggtgttcatcagcgtctggcgctgtgggagaaaggtctgcaacagggcttccacccgcatcagctgatcatgaccgccacgccgattccgcgcaccctggcgatgacggcctacgccgatctggatacctccaccatcgacgaactccccccgggccgtacgccggtgacaacggtcgccattccggacacgcgccgcagcgacatcattgaccgcgtgcgcaacgcctgcacccacgaaggacgtcaggcttactgggtctgtaccctgattgaagagtctgagctgctggaagcgcaggctgccgaagccacgtgggaagagttaaagctcgccctgccggagctgaacgtcggtctggttcacgggcgcatgaagcctgccgagaagcaggcggtgatgcagtcgttcaaacagggcgagctgcatttgctggtcgcgaccacggtcatcgaagtgggcgtggacgtgccgaactccagcctgatgattattgagaacccggagcgcctgggcctggcgcagctccaccagctacgaggccgcgtgggccgtggcgcgatcgcctctcactgcgtgctgctctacaaagcccctctgtcgaaaaccgcgcagatgcgtttgcaggtattacgcgacagcaatgacggcttcgtcattgcgcaaaaagatctggagatccgcggcccgggcgaactgctgggcacgcgtcagacgggtaacgccgaatttaaagtggcggatttgttgcgcgatcaggccatgatccccgaagtacaacgccttgcgcgtcatattcatgaacgctaccccgaacaggcggcagcgttaattgaacgctggatgccggaaaccgagcggtattccaacgcctgacggtcagccaaacatcggcagcatcaggtagagcttaatgaccagcgcgttgacgatatcaatgaagaatgcgcccaccatcggcaccaccagaaacgccatgtgcgacgggccgaaccgttcggtgatcgcctgcatattcgcgatggccgttggcgtcgctcccagaccaaacccacagtggcccgcagccagtaccgccgcatcatagtttttgcccatcatgcgccaggtaacaaagatggcatacagcgccatgaacacggcctgcaccgccaggatcgccaccatcggcagcgccagcgaggccagttcccacagcttgaggctcatcagcgccatcgccaggaacagcgacaggctgacgttccccagcacggacactgcgcgctcaaagacgcggtagaagcccatctgcgccagaccgttgctcaggatcaccccgataaacagcacgcagacaaaggttggcagttcgaaagccgttcccgccagccattgcgcaacgattttgcccacggttaggcagatggcaatcatggcgatggtttcaatcatcaccagcgaggtgatgctgcggccaacgtccggtttttcaaatgctgtcggcaccatttcatcgtctggcctgccttccggcgtggtggagtgtttcaccagatagcgcgctaccgggccgccaatcagcccgccaagcaccaggccaaaggtcgcacaggccattgccacttccgttgcgttttcaaagccatagcgttcgatgaacagcttgctccacgccgcgcccgttccgtggccacctgacagggtaatcgaccccgccagcagacccatcagcggatccagccccagcaatgacgccataccgatgccgatggcgttttgcatcagcagcaggcccaccacaacaatcagaaacacgcccagcaccttgccgcccgaacgcaggcttgcgaggttagcgttcaggccgatagtggcaaagaaggccagcatcaacggatctttcagggacatatcaaaatcgatttcccagcccatgctttttttcagcaccagcagggccagcgccaccagcaatccaccggcgacaggttcaggaatggtgtactttttcagaaaggaaacactgtgtaccagcttgcgaccaagcagaagaaccagcgttgcggcaacaagggtcgacaacgtatcgagatgaatcataaaaggctcctgttatgcgcgtgttccatacacacgcggcgttatcctgggccgggtgatgctcgtcatgagccgccggcgcgaaaagtgtaattttttttcctgttcgttgtagaaaacctgctcacaccggcagattttctctcttttttttgctggcaatcgtttgcttttaccaggtggtcagctaaaatgcccgcttttccaccgtgggattgccgccgatgtctgttaacactctggagtctgctgatgcgcaaccgattgcgcagaagcaaaacagcgaactgatttaccgccttgaagatcgtcccccgctgcctcaaaccctgtttgccgcctgccagcacctgctggcgatgttcgttgcggtcatcacgccggctctgctgatttgccaggcgctggggttaccggcgcaggatacgcaacacatcatcagtatgtctctgttcgcttccggcgtggcctccatcattcaaattaaagcctggggtccggtgggctcgggtttgctgtcgattcagggcaccagctttaactttgtggcgccgctgatcatgggcggtacggcactgaaaaccggcggcgcagatgtcccgacgatgatggcggcgcttttcggcaccctgatgctggcaagctgcacagagatgatcatttcccgcgttctgcacctggcgcgccgggtgatcaccccgctggtctccggcgtggtggtgatgattatcggcctgtcactgatccaggtgggtctgacctccatcgggggcggctacgcggcaatgagcgaccataccttcggcgcgccgaaaaacctgctgctggcaggcgtggtgctggcgatcattattctgcttaaccgccagcgtaacccgtacctgcgcgtggcatcgctggtgatcgccatggcggccggttacctgctggcgtgggcgctgggcatgctgccggaaaacaccaccccaaccaacagcgcgttgattaccgtgccaacgccgctctactacggcctgggcattgactggagtctgctcctgccgctgatgctggtctttatgatcacttcgctggaaaccattggcgatatcaccgccacctccgacgtgtccgagcagccggtctccggcccgctgtacatgaaacgtctgaaaggcggcgtgctggcgaacggactgaactcgtttgtctcggcggtgttcaacaccttcccgaactcctgctttggccagaacaacggcgtgatccagctgaccggcgtggccagccgctacgtgggcttcgtggtagcgctgatgctggtggtcctcggcctgttcccggcggtgagcgggtttgtgcagcacatccctgagccggtgctgggcggcgcgacgctggtcatgttcggtaccatcgcggcctctggcgtgcgtatcgtctcccgcgagccgctgaaccgccgcgcaatcatgattattgcgctgtctctcgccgtagggcttggcgtctcccagcagccgatgattttgcagtttgccccggactgggtgaaaaacctgctctcttccggcatcgccgcgggcggtattaccgctattgtgctgaatctcattttcccgcctgaaaagaactgatccccacacggcaggctgtcaatgcctgccgtgacatctctttacaccattcccgccttgagcattgcgcataaatcgtgcataacacccttatgtgcgtttcgcgggaaggaagaccatgaaatttattggaaagctgcttatctatcttctggtagccctgctcattgtagtgctcgccttttattttctgctccagacccgctggggcgcatcgcaggtcagcagctggataacggtgaataccgattacgagctcaactttgacctgatggatcaccgcttttcatccccttctcacatccttctggaaaacgttaccttcggacgagatggcaaaccggccacgctggtcgctaaaaaagtggatattggcttaagcagccgccagatcaccgacccgctgcatatggatgccatcaccctgttcgatggcacgctgaatttatcgccgcagacggcgccgctgccgttccaggccgaccgtctgcaactgaataacatggcctttaacagcccgaatacggagtgggatctcagtgcgcaaaaggtgaccggcggcgtcagcccgtggcagcccgaggcggggaacgtactgggaaaaaatgcgcaaatccagatgagcgccgggtcgctcacgctcaacggcataccggccaacaacgtgctgattcagggacaactcaacggcaaagaggtggtgctgaataccatcggtgccgatatggcgcgcggctcgctgacgggctcggctctgcgtaatgccgacggtggctgggttatcaacaccctgcgtctgaatgagatccgcctgcaaagcgacaaatcgctgctggatttcttcgcccctctctccaccctgccttcgttacagattgggcggctggaagtgaccgatgcccgtctacaggggccagactgggcggtaaccgacctcgatctcagcctgcgtaacctcaccctgagtaaaggggactggcaaagccaggagggacggttatccatgaacgccagcgaatttatttacggctcgctgcatctgtttgactctatcctgaatgcggaattctccccgcagggcattgcgctgcgtcagttcacctcccgctgggaaggaggcatggtgcgcacctccggcaactggctgcgcgagggtcaggcgctggtgctggacgacgttgccattgccgggctggaatatacgcttccggaaaactggaaaacgctgtggatggacccgctcccgtcatggctgaacagcgtgacgctgaaaaaatttggcctgagccgcaacctggtgatcgacatcgatccggcgttcccgtggcagatcacctccctcgacggttatggcgctaatctgcggctggcgcaggatcacaagtggggcgtgtggggcggtaacgcaaccctcaacggggcggcagcaacctttaaccgcgtcgacgtgcgtcgcccgtcgctggcgctgaatgccaacgccgcaacggtaaatattaccgatctgagcgcctttaccgagaaagggatcctggaagcgaccgccaccgtgtcacagctgccacagcgacaaaccaccgtgagcctgaacgggcgcggtgtaccgctcaacgttttgcagcagtggggctggccagcgctgccgattgcgggcgacggcaatattcagctcaccgccagcggcagcgtgcaggcgaatgcgccgctgaagccgacggtgaacgggaagctgagcgcggtgaatatggataaacagcaggtgcaacagaccatgacgggtggtgtggtgtcgacggtggctccggcacagtnnnnnnnnnnnnnnnnnnnnnnnnnnnnnnnnnnnnnnnnnnnnnnnnnnnnnnnnnnnnnnnnnnnnnnnnnnnnnnnnnnnnnnnnnnnnnnnnnnnnnnnnnnnnnnnnnnnnnnnnnnnnnnnnnnnnnnnnnnnnnnnnnnnnnnnnnnnnnnnnnnnnnnnnnnnnnnnnnnnnnnnnnnnnnnnnnnnnnnnnnnnnnnnnnnnnnnnnnnnnnnnnnnnnnnnnnnnnnnnnnnnnnnnnnnnnnnnnnnnnnnnnnnnnnnnnnnnnnnnnnnnnnnnnnnnnnnnnnnnnnnnnnnnnnnnnnnnnnnnnnnnnnnnnnnnnnnnnnnnnnnnnnnnnnnnnnnnnnnnnnnnnnnnnnnnnnnnnnnnnnnnnnnnnnnnnnnnnnnnnnnnnnnnnnnnnnnnnnnnnttccttctaccgtgggtgagggcatcagaccgcataattaccgtaggcccggtaagcgaagcgccaccgggcatttttccagctcagaggtgaaccaccacctcatccccctcggctttcaccaccacaccccactcgctgcccgcatgtgaaccgccttttacgccgccgaccttctgcacgttgcgcaagcacaccgaccagttttgcgcatctcccgcgccggtaaaggtcacgacgtcgccctgacgtgacgccttcagcgtaaacaccacagaaccgtccgccgcaagcacttcacttaccgccgttgcgccatcgctcaggttgaagagctggaaggccgtcccctcgtgccacgcatagtctggcttctggttattgttacccagcgccagcagcgtgttgtcgcgcacatagaccggcaggctcaggaaatcatgctgctgcttatgccagcggctaccctgaatttcgtcgttgtgccacaggtgcgtccagcgcccttccggcaggtagaactgcacgtcccccgcctcggagaacaccggcgccaccatcattgaatcccccaacatgtactggcggtcaaggtaatcgcacgccggatcgtccgggaactccagcatcatcgcccgcagcatcggcgtgccgaactcgtgcgccagcgccgcctgacgatacaggtacggcatcagctggcatttcagctgcgtgaagtggcgcaccacatcgcaggactcgtcatcgtacgcccacggcacgcggtaggatttgctgccgtgcaggcggctgtggctggagaacagcccgaacgcgcaccagcgtttgtagacgtgcgccggagcggtgttttcgaacccgccgatatcgtggctccagaacccgaagccggacaacccaatcgacagcccgccgcgcaggctttcggccatcgactcatagttggcgtagcagtcgccaccccagtgtaccgggaactgttgcgcacccacggaggcagaacgggcaaacagcaccgcctcttcttctcccaccgtctctttcagcacgttccacaccagctcgttatagatgtaggcgtagtggttgtgcatcttctgcggatcggagccgtcaaaccactggatctccgtcgggatacgctcgccgaagtcggtcttgaagcagtcgacgccgatctccaccaggcctttcagtttgtccgcataccacctgcacgcgtccgggttggtgaagtcgtagatcgccagccccggctgccatttgtcccactgccacagggagccgtccgggcgcttgagcaggtagcccttctctttcaactcccggaagatcggcgatttctggccgatatacggattgatccacacgcagaccttcagctctttctctttcaggcggcggatcatgccttccggatccgggaaggtcaccgggtcccactcgaagtcgcaccactggaaggccttcatccagaagcagtcgaagtggaacacgtgcagcggcaggttgcgctcggccatgccgtcgataaagctgtttaccgtcgcttcgtcgtagttggtggtgaacgaggtggtcagccacaggccgaacgaccacgcaggcggcagcgccggacggccggtgaagcgggtatagcggttcagcacttctttcggcgtcgggccgtcgatcacaaagtactcgagatactccccttccacgctgaactgcactttggagactttttcggagccgacttcaaacgagacgttctccgggtgattcaccagcacgccgtagccgcggttggtcaggtagaacgggatgtttttgtaggattgctcggtgctggtgcccccgtcgcggttccaggtttcgaccgtctgaccgttgcgcaccagggcggtaaagcgctcgcccaggccgtagaccgtttcccccacgcccagatccagacgttcaaacacatagttgcgatcggtgttgctgtcctgcacgtagccgttgtttttcagctggctgccggtaatgcgctggccgttgcgcaggaaatccagcgcccagaactcgcctttggtgacgcgcacgctgacgctgccgcttttcagctcggcaaaatcggcgttgttttcaatctctaccttcacgtctttcagaacgttcagcggatagtgcgggccgttattcagcgcgccctggaagtgctcgatacgcaccccgacgatcccttcctgcggggcaaacaggcgcaccgtgaacatcaacgtgtcgagctgccaggtgcgttcgcgcacgtcgcgcggcgccacaaacacgaccaggtcattgccctgctgctccacgtcgaacacctgcaccggatacgtcacgttcaggcccggttgaataagccagtttccatcactgattttcatgcttacgtcctcttagttctgcaattctttgctgactggcaggttttcaaactcctgctgattgcggcgcgcgccctgcgccagctcgcgcaggattttggtcaggaagggggttttcagcgtgtagtagcgtttggcgataatggcgctcagcacgtagcagatcgccggagccagcgtaaacaggccgatgatgatgctgatggtcgcgctgttctgggttttggctgccgcgtcgtagccgccgcctgccagcatccagccgatcatcgccccgcccagcgccaggccgagcttcagcacgaacagcgtgcccgcgaagctgatgccggtcagacgtttgccgttggtccattcgccgtagtcgacggtatcggacatcatcacccactgaatcggcgtcaccagctggtgcagcacgccgataacgaagatgaagccgaacatcagcacggtggcatgcatcggcacgaagaacatcgccacgctgaccaccgccagcgcggcgttggtccaccagaagatgctgaccttgcacttccagtcggtgagcggtttcgccagcgcggatccgatcaggttgccgacgcagtaggtcgtcaggaaggcgacgaacacctccggcgagcccatgatccaggtgcagtagtacatcatcgcgccgccgcgcacgcagacggcgaggatgttgaggatggtcagcacgccgacgatgcgccactggtcgttttgccagatatcacgcagatcttcacgcatggaggtggtgctcggcggcacctggatgcgctctttggtggtgaagaagcagaacgccagcatcaggaacgcgaccaccgacagcacggcgatcccgccctggaagccgaacgccttatcgtcgccgccaatcaggttcaccagcggcatcatcagcaccgtggagagcatgccgcccgccgtcgccagcacaaagcgccaggactggagggagatacgctgcgtcgggtcgttggtgatcacgccgcccagcgcgcagtaggggatgttgaccacggtatagagcagggtcagcagggtgtaggtgatggcggcgtaaaccattttaccgttgaggctgaggtccggcgtggtatacgccagcacgcagacgatgccgaacggaatggcgccgaacaaaatccacggacggaacttaccccagcggctgcgggtgcggtcggcaatcagccccatgcacgggtcggagatcgcatccagcgcgcgggccagcaggaacatggtgccgacaaacccggcgggaataccaaaaatatcggtgtagaaaaacatcatataaagcatgacgttatcaaaaatgatatggctggcggcgtctcccatgccgtagccaatcttctcttttactgacaggacttcgctcatatttttatccttcacgctgtagggggcgctgagaccggttaccgttttttaaaccattgtttcaggggcgggtattgcgttttctggttaagagattacgtttcttgttttttgtgatcgggataaaagttgatgagcacgaaatgctaacctgaggattttcttaagaattagctgaaacaggggggttaaggtcaaaagagaggtgaaaaaagtggtgtggggtatgtggtaaatgcctgaaagtagctataatgcgccccgcctccatgtagcaatgcaggcgcggaagatcgtcatctccggtgaggtggctggacttcaaatccagttggggacgccagcgttcccgggcaggttcgactcctgtgatcttccgccaaagttcctccgctgtcatccgagaatgtctaaaaactctttattttcaatatacataattgaccactcatccgtagccgtccgacaagttctccctgaatccatgaaaaatatgtatagtgatgtgtatagattttttatacacatttttggcttatacacatggcacttacagacatacaaatcaaacgagcaaagccccaagacaagccgtacacattgaacgacgggcaaggtctgtcaatgcttatcaatcccgatggttcaaagggctggcgtttccgtttccgccttgctgggaaagcgcggttaatgtcattcggtagctacgatttggtaagccttgcagaagcacgtgagaagcgtgacaccgcccgtaagcaagttgctaatggcattgacccggtagaggaacgcaaagcattaaaactcgctcaaaagctatcaacagaaaactctttcgaatcagtaagccgtgagtggcattcaactaaagccgatcgttggacagttgcttaccgagaggaaatcatcaaaacatttgagcaggatgttttcccttttattggtaaacgacctataggtgagattaagccattagagttgcttgaggtgctgcgacgcattgaaaaacgtggagctttagagaaaacccgaaaggtgcgacaaagatgtggagaagtgtttcgctatgcgatcataacaggtcgtgctgagtataatcctgcccctgacttagctatagcgctggccgttcacaagcaaaaacaccacccgtttttatcttccgaagaattaccacattttattcgcgatttagaagcgtatacaggtagcattattactaaaaatgctacaaaaataatcatgttaacaggtgtacgaactcaggagatgcgttttgctacttgggatgaagttgatttagataaaggggtatggcaaattccagcagaacgtatgaagatgcgtagacctcaccttgttcctttatctactcaagttattgacctctttaagcagcttaaaccaataactggccattatccttatatatttattggaagaaataaccgtagcaaacctatttctaaagaaactgtgtcacaagtaattgaattattaggttataaaggacgtgctactggccacggtttcaggcatacaatgtccactatcttgcacgaacaaggttttgaaagtgcatggattgaaatgcaattagcgcatgcggataaaaataaaatacgcggcatatataatcatgctcaatatttagaagaacgaaagaaaatgctgcaatggtatagtaatcttcttattaatacaacgtggtgaaaatcatgagcgcaagtttacaagatgttacggattttgattttattatttctgaagcatatagaataaataaagaattagcttcatctaattttaaagatttctatcgaaaagaatatgatcgtccccttggttcaataggaatgactatagacactccgtgtgagcttatagagaaaaacaatgacaccccaagacggcaaatccatctttcatacctttcaaatgaaaggctatattccatagcagcaagatatatcaaatccaatagattagagatgttggttgctgtggacgaattagtggcaaaaataaaggacagtctatatattcacatattcatcgatgatggtgaagatggaattaaaggatgcacaagaatccttaacaatgcatttaaaatgataaaaagggaaatggtagaagaagagttctatttccctgtgttagctcacggcctaatcaaagataaaatttcaattggtcgcgctgaaataatctcatcaaagaaaatgtattcaataattggtgatgcattgactgaagaccagcttgcattgtcaacgagatattgcctttctcataaatacccctatgagcatttcctaaaaatcccaataagtaaacgctctaaaaagagtagggagcgaatcgctaaaaatatagcaggctttgtagtagggatactacatttatttagcgagcactataaaatatcgccacactttttaagtttatcaactagcccctatcctaactacgaaggtttttatttcacaaagaaatctaatagtaatttcaactataatcattcatctataggtcgggttgtatggagtgataagttctgggataaatttgaggaagattactgttccgatttaggagaggtgttatctcagctaattgacttagccatcgagcctaatgaaagatctatcatttctgaccgattaattgatgccatctatttatttagtagcgcgcaacaagataaggatgaaagttcacgcatagtgaaattagcaacagccctcgaaagacttgtgagtctaccaagtgagaaaaaagattcttcaactacaaagaacttcactagacgcatttcatcattagtttcaatttattatccaaatgaaaaggactgggataaggttgctaaagaaatgtatgaaattagatctgacatagctcatggagcctggtctctatatcgaggagttgaacctttgtattcatcccgatatagcgaattaactagcagggcaattttttctgcatgcatgggattttacaagcgaggctttactgaaaataacaatgataaattagtgaaggaattctttgattttctagaaaacgccatagacaaaaataaatgacaagtgtacgtgtgcgcgcaatgctctccccgccccgcctgcccgcttaagagtgcgcttttaatgcaggtgcatgaccggcctcagggcacgccagtgctggcgctggcgggggattcagtgtcggtaaaacgcatgcaaaaccatgcaccttatgcatgcatggcttttatacgtaaaaatggagggattttcggggatttttaagcgaactactgcacggccagttctgcacggcggcgggtgtaattcaggttctgtgcgggtgtgaatttttcacggctatcatcgcgcgaagccgcgtcaggcctgaatccgatggccgttaaaatgtcattgtcctgcgccgaataattaattttttcaccggcggccagccagacctgtagcgcctcacgcagacagtcgagtgagtgctgtatggcgcagcgctgaatggcggggtgttgcccgggataattcatcagctccggggcgagggcggcggccagctccgcgccgtgcgcctgcataaaatcatttaatcggtcgcggatgctgatgcgctgcacctcctcatgcgagcggatatagcgaccggcagcctgattaatttcccactttttcacgtcgataatctcgcgcagcgtttgcaggctccggccgctgtggccgctgccggcaagctgttcgcggtatgcctgctcggcctgcgtcagttcttccctgcgttgcagccaggcggatttgtttgcctgacaggcctcaaaggctttctgtagcgtcagtgttgtcacgtatgtttctcctgatgactggccgtgcttacgcaccggcacggttaacggtggccgccggtgcgggtacagggataaccggctctgtcaccggtgaacgaataaccccgtcgatggattcaagcgtacggaacgtggccgagcattcgatgttcatgcactggtgatagcgctgtttgacgttatcggacagataacgactggtgcgggaatgcgcgctggttttgcagaacgggcagtgaaacatgcttacccctccgcttctgtctcgccattttcagccagctttctggcgagcatcattctcttcgcagggctgcgtaacagctccgtatccacgcctgtaatctgcggtcggtgcatgcccgtcacggacaacaccggctcctgcgtcatatcgaagtgatacaggctgccctgacggctcagcgcatcgcgtagctcactgatggccacggactgcggggcactttctcccttcatttcgagggcacgaacacgcagcaggaaagcgcggataagggcgacaggaaccgcattgacagcctgagtccattcagcatcggcgtaagcggtaaaggcatcgtcatgcgctgaaaggtatttattgccggtggagcaggcattcagcatggcgcgtgtccggtcgttctccagctccgctatcagaccgatgaactcgtcggccagctcgcgactggcgatacgcctgctgtgctcagctttcatttcaggggtgagactgccgcgcagggtgcgaaagcggctgcgccagtcctgctcagcctctgcgctctcattgagggcggtctgtcgctcctgcttacagcgttcaatggacttattaatctctttcagtacctgcatgctggccgcgtgggtgtctctggccgcagtgaatgcgctcagcttgtcggtgatgtgctggctgttctctgcggactgcttggcggcaacatcttgcaggacggtgatgagtgtttcgggtttcatgttcaggctctccgtttattcaacctgaaatgattctgcccttcatcacacaacatctcgattcattgcagttgtggcagttctggcacaaacaccactcaaaacccggcttgccagagaaaggtctcagcaaaaccttacccatcgtttgtttttttacttataactattcaccactgttcaccttaaataaaaatataagtaatacagtaagataaagggtgaacagttgagggcatgactgttcaccctctgttcaccactgttcaccctcctgttttgctctgtccaaaccacttagattttatttcgattaaaaatagaaaaatgtataactaaaagcaatagaaattgctgcattgtaatgcagtgatttgcatatctttgccagcgtttgcctttgtttgccagagcgaaaagtcaatgtttgtttccccgaaaatctcacatgacctgaggaaaaatatagacataataaggagctacccgaagccggacggacatgaccggcactgtatggactttatgaggtagcccgatgcacaccgctttttcttccccgtcttctgcccctgccaccccactgatgccggtttctgatgccgttcaggaacgctttctccgcctgcccgaagtgatgcatctgtgcggcctgtcccggtcaaccatttacgacctcatcagccgcgaggccttcccgaaacaaatcagcctgggcggcaaaaacgtggcgtgggcgcagtctgaaatcaccgcatggatggcagatcgcattgccgaacgcaaccggggctatgacgcatgatgatgaccgttcagcgttcagcccctttttctggcttgcttcctgtcgtcgtttccaggtatagttttcacgctgtcgcaaaatcggcagccgggcgtaggaacccgagttactcaatggcgacaccagacgcgccatgcgtctttttttacgtcgttgctcaggcacacccatttttcgggctgtggtgcttataccttagcccctgtcagataatggtgatccgggcggggcagccttcgggctggccggtattcattgaggccggtattcctacccccgtccgggtcaccacccatgagcgtaggaactccggtggtggcaataaccgctactcaatggaggttgccatcatggctactaccctaaccccgtcacacccgcagtttgtctttgtgtttgccgccgttcgtcgcgcagaccgtaaaccccgtatctgtatgctccgcaccgttgccagtgatgaacacgctgcacgtcgttccctcgttcgcgattacgtcctctcgtttgccggccgtctgccggttgcggaggtgcgcgcatgagacacaccaccattaccgcccgtgacctcgaatgccttgagcacatgcgcaatgtcggccagctcgtcaatgagctgatgcaggtacaggattgcgccaccgttcgtcgtgatccnnnnnnnnnnnnnnnnnnnnnnnnnnnnnnnnnnnnnnnnnnnnnnnnnnnnnnnnnnnnnnnnnnnnnnnnnnnnnnnnnnnnnnnnnnnnnnnnnnnnnnnnnnnnnnnnnnnnnnnnnnnnnnnnnnnnnnnnnnnnnnnnnnnnnnnnnnnnnnnnnnnnnnnnnnnnnnnnnnnnnnnnnnnnnnnnnnnnnnnnnnnnnnnnnnnnnnnnnnnnnnnnnnnnnnnnnnnnnnnnnnnnnnnnnnnnnnnnnnnnnnnnnnnnnnnnnnnnnnnnnnnnnnnnnnnnnnnnnnnnnnnnnnnnnnnnnnnnnnnnnnnnnnnnnnnnnnnnnnnnnnnnnnnnnnnnnnnnnnnnnnnnnnnnnnnnnnnnnnnnnnnnnnnnnnnnnnnnnnnnnnnnnnnnnnnnnnnnnnnnnnnnnnnnnnnnnnnnnnnnnnnnnnnnnnnnnnnnnnnnnnnnnnnnnnnnnnnnnnnnnnnnnnnnnnnnnnnnnnnnnnnnnnnnnnnnnnnnnnnnnnnnnnnnnnnnnnnnnnnnnnnnnnnnnnnnnnnnnnnnnnnnnnnnnnnnnnnnnnnnnnnnnnnnnnnnnnnnnnnnnnnnnnnnnnnnnnnnnnnnnnnnnnnnnnnnnnnnnnnnnnnnnnnnnnnnnnnnnnnnnnnnnnnnnnnnnnnnnnnnnnnnnnnnnnnnnnnnnnnnnnnnnnnnnnnnnnnnnnnnnnnnnnnnnnnnnnnnnnnnnnnnnnnnnnnnnnnnnnnnnnnnnnnnnnnnnnnnnnnnnnnnnnnnnnnnnnnnnnnnnnnnnnnnnnnnnnnnnnnnnnnnnnnnnnnnnnnnnnnnnnnnnnnnnnnnnnnnnnnnnnnnnnnnnnnnnnnnnnnnnnnnnnnnnnnnnnnnnnnnnnnnnnnnnnnnnnnnnnnnnnnnnnnnnnnnnnnnnnnnnnnnnnnnnnnnnnnnnnnnnnnnnnnnnnnnnnnnnnnnnnnnnnnnnnnnnnnnnnnnnnnnnnnnnnnnnnnnnnnnnnnnnnnnnnnnnnnnnnnnnnnnnnnnnnnnnnnnnnnnnnnnnnnnnnnnnnnnnnnnnnnnnnnnnnnnnnnnnnnnnnnnnnnnnnnnnnnnnnnnnnnnnnnnnnnnnnnnnnnnnnnnnnnnnnnnnnnnnnnnnnnnnnnnnnnnnnnnnnnnnnnnnnnnnnnnnnnnnnnnnnnnnnnnnnnnnnnnnnnnnnnnnnnnnnnnnnnnnnnnnnnnnnnnnnnnnnnnnnnnnnnnnnnnnnnnnnnnnnnnnnnnnnnnnnnnnnnnnnnnnnnnnnnnnnnnnnnnnnnnnnnnnnnnnnnnnnnnnnnnnnnnnnnnnnnnnnnnnnnnnnnnnnnnnnnnnnnnnnnnnnnnnnnnnnnnnnnnnnnnnnnnnnnnnnnnnnnnnnnnnnnnnnnnnnnnnnnnnnnnnnnnnnnnnnnnnnnnnnnnnnnnnnnnnnnnnnnnnnnnnnnnnnnnnnnnnnnnnnnnnnnnnnnnnnnnnnnnnnnnnnnnnnnnnnnnnnnnnnnnnnnnnnnnnnnnnnnnnnnnnnnnnnnnnnnnnnnnnnnnnnnnnnnnnnnnnnnnnnnnnnnnnnnnnnnnnnnnnnnnnnnnnnnnnnnnnnnnnnnnnnnnnnnnnnnnnnnnnnnnnnnnnnnnnnnnnnnnnnnnnnnnnnnnnnnnnnnnnnnnnnnnnnnnnnnnnnnnnnnnnnnnnnnnnnnnnnnnnnnnnnnnnnnnnnnnnnnnnnnnnnnnnnnnnnnnnnnnnnnnnnnnnnnnnnnnnnnnnnnnnnnnnnnnnnnnnnnnnnnnnnnnnnnnnnnnnnnnnnnnnnnnnnnnnnnnnnnnnnnnnnnnnnnnnnnnnnnnnnnnnnnnnnnnnnnnnnnnnnnnnnnnnnnnnnnnnnnnnnnnnnnnnnnnnnnnnnnnnnnnnnnnnnnnnnnnnnnnnnnnnnnnnnnnnnnnnnnnnnnnnnnnnnnnnnnnnnnnnnnnnnnnnnnnagcatcaagcgcgatgctgacccgacgtttgatttttgcggctatctggaaatgctgccgcagaccaacgggatgtttatgggtaatgccagcatcgtcccgcgtaattaccgtaaatatctttatcacgcgtatctggcctatatggaggctaacgggtacaggaacgtgctcagcctgaaaatgttcgggctggggttgcccatgatgctgaaagagtacggcctgaattatgaaaagcggcacacgaagcaggggatacagaccaacctgtcactgaaagaggaaagctacggcgactggctgccgaaatgcgacgaacccgcagcgacataaccttactcagaccggcaacagccggtcttttcctttctgaccgttgccacaaggtgaacaatccactgttcacccttcaccgtatattcaccctgtatcaccatgaaattactgataaaaaaccagaggtgaacagtgtgaacagtaaaacctaaaaaaactttttaccccaccaccttcgcatttccgcaatctatgttcagggcaggacatcgactagcagagagtagtttaatataaaaacaattcttaaaccggatttcttagttttcatcaaatacgtcaagtacttaataaatagactttatggggatatttaaaaattaattttcaaaaaataattgaattgtattcaaaccatcaccacaaaatgcaatatttaaaaaccaccataataatctgagcatattcctgcataatatattaaaaaagaaccacctttattacaatatacttggtgatatttatatgctatgattaagaatgagaataatttttgggggcattatgaaaatttgttttttcgatatggagggaactttactcaaaaagaatttatctttagataatgggaaggtggcgccaagtgcatggacagttcttgcaaaagaaatcagcgaagcctgttatattgaagaagaaaaaacaaaagatttatggctaacaaataaatacatcagttatacgcaatggatgaaggagacagtagaaatacaaattaagcaaggaatgaataaaactcatctacaaacagttttatctcaagcagaattacaaaaaggtgctgtggagcttattcagtttttgaaaaaaaaggatatttaacagtattgatatcaggtggatttaaagaactagcagacctaactcaacgtaagcttaaaatagaccatgcgtatagtgcttgtgagtacttcttcgataaaaatggtagtgttgagcattttaatctattaccaacggatgaggaaggtaaattagtttttatgaaacaccttgcatcagaatataattcagagcttgaaaattgcatttttattggtgatggtaaaaatgatgtatttattgccaaaaatgtaggtacatctatagcctttaatgcacaaaaggaattaaaagatgtagctacatttattgttgaccaagaaagtccagatctatctgcgattattaacattattagttattaatggcttttcattggcatcgactttagcctggagagtctttaattgatcttctaggctacttatcttttcttctgatttaatcttgtattcatgaaaatcttttaaatcataactataagcaaaaaacatgtccctaccaatcggaagaagtgacaaaaccagcccaactactgcaattaccactccaattttagttattgaaatgctatttaatttttcagtcaactccttactaatttgctctttaagaactactggctctaaaaatgttttagggaatttggctatatccgaggaacagtaagatttatattttttatactcttttttaacattataagcattggagtcaggaggtgttgggttatagttcgtatttttatctatttcatgaaagacaactctaaagaaggatttatccacttcattattagtaatcggtagatattcctcaactgccgaaaaattaatcagcaaggtagaaataggaccattgtaatttgaatcaattatcccagtattaagggcgaggaaccccctctttgataaagtgtttttcaaaaaaacatacgcaacaaaaccttccggaacgtgtaatatttcctccgatattacaaagactgaatcctgtggtttcaaaataacccgcccaagagactgaacattatttttatcgtccttataaagaacctctctaattgtgagatccacacttgatttattagaataatcctttgttatccttttatttttcctgttacagacaaaaccaagttctattgccttttgtagcactgatttgcatctttcacctaacctaaattattattaattctctatatgattaaactagttataagatatcaattagatatttccaatagtttttgtaaattaatgctaaaaatcacctggtcaacaggtcaacactgtgtatagaaaagtgtataaagacattggagatacaagataaataacttatagatcatataattacacctcagataagactcctgtgatctccgccaaaatctaattatttcttgtgaaagaaatctcaccttttattaattcaaagtagtattttaagttttgtgctaattgagttttatgaggttccagagctttattagcaatctgataagttaacttttcaactttctcaagccaactatactcgctttctaaatgcttgttatatttgtctctagtatatcgagcaagcaaagaagacattagtttattattacacttccagtcatcaataataatataagaaaaatatccgggtggtattaagtgtaagaaagctactccaccatagttgccatcatctataccatattcatataaagatgaatatttattagtgcttaaagaaaaagaatgtaacagatctgggtatgtcttttttagtgaatcatttaaacgataatgaacagcccccttcagatagcatctaatctctttgaaagtatttttttccgacgaaataaagcctaagccataaactgaactataactatcgctaaaaaaagaaatcttcggcagaagcaattttcgtttttttatctcatcaatatagttatagaaaaaatccttaatatcttcacctgaggttaaactaatgtcattattttcttccaaacttaacactatgccaacaacatgcataattacttctggctcaataatttcacatttttcaagttgttttttaagacctttctgtgcgaataaaaatcttgtcctagtaagatcactccaactccataactctctccagaattggcgagcattatcgttaataaataatggatgctgcgataaataacattttatattgttaatatcaattactccactcgaatacaagaaagcaattgttttgtatgggataactggatcaaaccaatccaatgatttatatttatcaatagtgttaataaccccatttgtttttgttttagataacgcatgaattaaagagtttgttggtaagtcaatgacttcctcatatgttatacgtcccgatctaatttctattcctagagctaacattgaggacaacaatttatcagcagcaatagttgaagtttggaaataatcacaaaaaagtgaaattaacctttcataatcatcaaatatagcccttacacttctaaaatttacactgccggacatttttataatatcgtttattaaatctttgttctttttaatataactacgtgctaattcattattgatttgttgactaaaaacctctatcacttgttcaatagaaggagttaatgataacgtctttcctacaaccttttctttaattattacatattgttctttttgctcacttgtgaaatcattttcacttgctataattataactttgcatgctttatgttccacaaaggaatttatatagcccaatacactttgaatgggaatcaaacatctttctagatcatcaaatattaaaattcttttttctacatttaaaatgaagtcttttattatatattttgcatctgtgtcttttgtaacatcggttcctgcaacagcatttattactctagaaataaaaaaccctattgccttaaatactttggaagataattttggatgtacttgaaaaaataatctctctgttatttctgcgttggtgattaatccattcaagctaatgtaaaggggattagatttatatttattattaactaaaacacaacttttaatgaagtgagtttttccactaccccatggcccaacaagttgtacagcatagtctgtattattttttctagaaagataataatttaaataatttataacattgtcatttaattcttcattttcattgaatgccatacatagtatctcgtttaatatggggttttcccaagcctagctatttctttacgccctaggcttttcaaccaattacccaaactcattccgtcagctttcgcagcttcttcaaactgtgccttcaactccggcgtaatgcgaatttgaaaagttggtgcttttccggatttagatttgttagggtcgcgtttagctgttgacatgtacgtacctactagagcaagataacctcattgaggtacgtaccttagcatacaaaaacctcaaattgaaacgccctcgtcgggtactcgcaataccggacgagagctaacctcaccaactatcaaggagttgattatggctgattcgcattctaccccagacaccgaccaatccggaaccgagcgttcgttaattgtgggataccgcccgaatgttttcgacaaatccacgccgaaaatcatcctttccggcaagtggctgcgcgcggcggggtttgataccgggcagcaggtcacggtaaagatcatgaaagggtgtatcgttctgatggcgtataacgagcaggagcagaggttgcaggatgattataaacggacgaaagcaaagcttattgagatagagaacgcgcttgcagcgatccaaattccacatgctggaaagcgcctcgcaaaatcaaatacaaaccacctggcttagcggctgtttctggcatactacctgcctggtgcattagatgtggaggcgacatggcagataaagacgtaatccaatccccggcaggcgaattggttatgtttgccagtgatgatggaacggttcgcatcacatgtcgctttgaacatgaaacactctggctgtcgcaagcagccattgcgtctctttaccaggtcacccctcaagctattactcagcatattaaagctatttacgaagaaggtgagcttgaacaaaaagcaacttgtaaggcttacttacaagttcagcaagaaggtcagcgcaaggtcaatcgcaacacacttcactatagcctgcccgtcattctcgccatcggctatcgcgtccgatccacgcgaggtacgcagttccgccagtgggccacccaaacgctccaggaatacctggttaaaggcttcgttatggacgacgagcgcctgaaaaatccgcctgtgggatcttccgccgtccctgactatttcgatgaaatgctggaacgcattcgcgatatacgtgccagcgaacgccgggtctatcttcgcgtgagggagattttcgcattagctgctgactatcagccgtcgctcaaagaaaccacgcaattctttcagaccatccagaataaactgcattttgcctgcactgggcacaccgctgctgagttgattcaccaacgagcggacgccactcaaccgcatatggggctgaccagctataaaggcgaagaagtccgtaaaagcgatgtcaccaccgcaaaaaattatctgtctcaggatgaggtgagcgagcttaatcgcgtcgttaatatgtggctcgattttgccgaagatcaggccaaacgccgcaagcaggtatttttacgagactggcaaaccaagctcgatcagttcctgcaattcaacgaccgggacgttttagaaggcgcaggaaaaatcagcaagaaagcggctgatgaaaaggcgtgctcagaatacatcgaatatgaaaaaaagcagcgcctgctgaaagaggccgaaggtgagaaagatattgtcggcttattaaaatgggataagcgggctaagcgctaatcccggtatttctgctcagcttcatatgcaacagaggaaacggattcccctgcccgtccagctccgagcgcccgacctgctcaaaccccatatgacgataaaacgccaccccctgcggattctgctcgttcacatccacttcatttacgccgaattctgcaatggcatattgcagcagcattttcccgatacccttcccccggctcgcatcatccacaaacagcatttcaatgcgatttttatccacgcccaaaaagccgtgaataatacccacgtcatcccgggcaatcacaaccctgagattaggcaaatatgcgttgagcaataacggacgcagcgccgcgatatcgctttcctgcaaaaagcggtgcgtggcgcgaacggacgactcccagactgcgacgaggcgttcaaattgtgaagggtgtgcggcttctattttcatggtgatattccggttgagtaaagtttcagggcagcaatgtaatgatattcagctctgcgaagtgcgccacacgccaggcgtacaaccatactccgtctgaaaatgacgaataaagtgcgcgcagtcgctgaaccccatccgctgcgcaatatccgtcacgctttgctgtgagttcttcagcagccagcaagcatagcgcagtctggcgctgcggataaattcgcgggccgttttgccgaattctgcgtggaacagacggttgagctggcgttcactcaatgccacttctcgcgcaagcccggcggtggtgagcggccgggtcaggaactgttctatcagcatgacggcgcggcgcaaccgcgagtcagggataagcgcaaaattcgccggacgcggggtggcaatttcatgcggaacgagcgacaaacgctgacaggtggtgctggcgatatcatccccggcatgggcgcggataagctcagttgccagcgtcagggtggaaataccgcccgggcaggtcagcacatcgccatcgtcgatgaaatcatacccttgctcagcataaaccagcgggaaagcctgccgaaatgcatcaaggtggaaaggatggatggacgctcgtcgttcattcagcaatccttcctgtgcgaggacaaaactgccggtgccaatgccaatgagcggaaccccggcatggtgggcatgtgccagatacgctttatccccctgataccctaagtccagatactgcaattcaccgccgataacagcaaggtagttaaaactgtccggcggcgcatggggagaatccggtctcatgataatccccgcattgctgataatcgggatatcaggaaattcacttatcaggctgattttaaatgctaatttatcctgagctttcgctgcataacgcagcgcctccagcaacccggagacggccaggagtgaataacggggccataatatcaacccaatatgcagacacttttccggtactgatttccccccatcggaggagtcaaatacacttttcatttacttgccaaatttaaaattaattacattatcgcaacatgatctgtcgcactttttatttctaaggtaatcctgatattttaaatcaaacataaatgagacgggaggaaaatataatgtttttctcgtttatatcattctttttttgaaccacgacacacatatgtcggtaatgttcctaaggtaaagatatagttaccattatgttgttcattgatccgcatataaatactcttgcccggatagacaaagaattgcggttcatatttttccagccagctgtcgtcgacattatcgtccgggaacgtcatatttttttctgacgtcagcaaatagagatgatcctgtctatccacccgaaaggaaattttcctgtcgatggttttacccggatcgctctttgcccggccattcatgctcagggtgccgaatttcccgtcgaagatgtaattgagccagaccgtcagcgtctcatccggatggtgctggaccagattagcctggcatgaaaaaggctgaacgtaagttcggtgccacaggtaatagcccgtcagcacgcctgccgtgacgaggcccgtcacgatgatatacagcatctgccgaaaacgagtcatgctagctatccttcaggaaataatcagatatacagcggttcggttctttcattggccggtcgcagcgaataaccgacgcacgaggaagcagagcgtaccagctgatgtaaacccagggatattgcgcgcattcagccttgaattgttccacataggtcannnnnnnnnnnnnnnnnnnnnnnnnnnnnnnnnnnnnnnnnnnnnnnnnnnnnnnnnnnnnnnnnnnnnnnnnnnnnnnnnnnnnnnnnnnnnnnnnnnnnnnnnnnnnnnnnnnnnnnnnnnnnnnnnnnnnnnnnnnnnnnnnnnnnnnnnnnnnnnnnnnnnnnnnnnnnnnnnnnnnnnnnnnnnnnnnnnnnnnnnnnnnnnnnnnnnnnnnnnnnnnnnnnnnnnnnnnnnnnnnnnnnnnnnnnnnnnnnnnnnnnnnnnnnnnnnnnnnnnnnnnnnnnnnnnnnnnnnnnnnnnnnnnnnnnnnnnnnnnnnnnnnnnnnnnnnnnnnnnnnnnnnnnnnnnnnnnnnnnnnnnnnnnnnnnnnnnnnnnnnnnnnnnnnnnnnnnnnnnnnnnnnnnnnnnnnnnnnnnnnnnnnnnnnnnnnnnnnnnnnnnnnnnnnnnnnnnnnnnnnnnnnnnnnnnnnnnnnnnnnnnngtcgttcgcaagataaacgcgacaggctccgacggatgccgcaaaacggtaatcctcaacaaaacggttttctgtggcgttcatatatcccgtcacgcctgccccggccaggacgatcaatagccccatgacgacagccagccagcgcgtgggcttcctggcaacgggcgttgctggctcggaggatgcagagacctcctcgatcgctggcgcctccccacattgttcctctgcgggttgaggcgcgacgggtgaagactctctgacggttatttgcgtgtcgcttgccagcgtcaacccaatccgcggaatggtaacgatagggtcagtttcaaaaccaatctttttgagccctttgcgcaggatggagatgttctggtaataggtattggaggagacaagcatgccgcggctttgccagacaatatcaaggaactcttgctgagtgacaatcgaccccgctctgtcgattaataacaacaggcatcggcctgctggcgaatttaacacaaccacacggtcaggattgttgatatcacgtaacgtgctggccgcaggatgaaattcgacgatattatttataatgtaatgcttatgcataggggcagtatgaattctccggttaacagatgttgaacctgggtcaccgcatgtatgggatgacattcacgtcgggattaatgtgactgattaacgtcatgctgtatatcttcgccattggcgaaaaatcttaatttatatttcatcccttaagcttcactgaacctgcataagaactcaacccttgtagaatgcggcttgcagagccgcttcatccgcgatcatcctcattatgatgttttgtgaagtgaatttccgctccacagaagtatctgactaccggcagcatctcatttatcagggcctcatcttttggcgcactcctcgcctcttgacattgacaaatatctacataaaaaaacattgtacgccacggacatgcgtgtctgaaatattcagcacccttaagccttaagttttctcaaccttaccaatatcaataacttacatggtttttgtatgcttttaagccacctttctatcagtttttatcgatgataacattcgtaaattgttattccccgtcagcaacttcacacccgcactgacaccaaaagacaaactccttacaaaacatttatcaaagctaaattttcattaaaaatagcggctatcataatttacagaaagcgaagcggaataagaccaatcagagggaagcgtcgtaaccggtctcgatcttagtaattaatacaattttagattaattcagattacctctttattggccgacgtatagtaggcctacagtatgcaatacgtcattgcttcgagaatactggcgataaccttataaataattcgcctgattactattataaatcgaggaataacatgacgaacaatagccaaataacacagcatataactgttgcactgatgggcggcgatcattatgcaagaaacggcattaaaacgttattaagcagcatccgcgacgaccttcacatcattatcatcgaaggaggttatcaggaactggataaggcgctgtcgtcgattcgtatcgatatcttatttatatccggcgcagagaaataccatacagggtatgactcactgaaatatttaaaaaaaatcaaagtcacgcagcctgaagtgattatctgcctgtactcaacctctgcccattccctgttatgggtccgggaagatattgatgcctatatctcgctacagaacacggtttatcagtggcggataaagctagcaaaaatggtcgatagccattatcggccccaaaagcagccagcggcgttatcgctgacgcctggagaaaggagggtattaaaggaactcaggaacggactggatatacgttacatcgcagaactggagaaactttcttatcgccgcgtgagcgccttaaaaagctcagcgataaggaaactcgggctcaggaataagacagatttgctggtctttttaaccagttagacctgccgctttcagagcaaatctcgtaataaaaaaatcaaggaactatgaaatgaaagcacgccttacttgccattctctgctggcattaagcattgccgccctgctgccagcgggctcagcactggccgccaccaccagcggcggcacggttaacttcagcggtaaagtggtgacctccgcctgtgccatcagcgccggtagcgccaatatcgacgtcgacatgggtgaagtgcgtaccgccacgctggctgccgcaggcagtgaagccagtaccgcaaaagccttctccatcaccctggaagattgcgaaatcgccgatacctccgcgtccacggaagataaccctattgccgcaacgaccgtggctatcaccttcaccggtacaccggacagtaccgatgtgaatagcctggccgcgggagtaaacggcggcgcgggctcggcgcagcatgtcgctatccgtctttatgacgaacagggcaacgtcgtcaggctgggtgagccggcagcagcgatccccctgcgtgcgggggcgaacatcctgaacttcagcgcgaaatattactccccactgggcaacgccacggcgggtgatgccagcgcggtcgccacctacaccgtgacctattcgtaatcttcaggcccggtctgctggccgggtctgactcagctttcaggagacgcactatgcgcgtaaacacatggatttgtctggctggcacgttatgttcatccgccgtgtacgcaggcggcgtggggttaggcgcaacgcggctgatttacaccggcgcggctacgcagacgatgatgcaggtaagaaatacccaccctgatgccacgtttctgatccagtcctggatggaagacgagaaagggagccgtaccaacgacttcgtcatcacgccgccgctgtacgtcatgaagcccgccagcgaaagcgcggtgaaaatcatgttcagcggcgacgccctgccagccgatcgcgagacgctgtactggatgacggtcaaagctatcccacagcaggttaaaaacggttccggcaattcgctgcaattcgcctctgccaaccgcatcaaggtcttttatcgcccggagcggctcagggaaggtgcaggggaggcatggaaaaaccttgccggcgcctaccgcgcgggcaaggtcacgctgaccaacccaacgccgtattacctcaccaccattaacgtgaaaattgatggcaggccggtgtcgcccgtcatggtaccgccgaaatccagcgtgacgctggcagacaccttcagccatgcgagcagcttaagctaccagacgattaacgattatggcgcctggacgcccgttacccgcacgtcattgtcccaataataaaaacagtaaggcgtgaccacatgaaaattaaaatcctgtgcgccacggcgatcgccctggtgattcggcaagccgtggctgccgaaagcgagctgcaatttaatcctgcgtttctcaacggcgagcgcgccaacagcgccgatctcgcctgggtcaacgccgggagcgcgttgccgccgggcgagtacaatcttaacgtgtatatcaacacccagttcgcgttcacaggtaacgtcacgtttcgcgtggctgaaaacaccgccggtgaagccctgccgtgccttacgcctgcgcaattcgccgcacttggcatcgacagccgtcaggctaaagggggtgagctgccgcctgcgcagcgctgcatttttttaacccagtcattcgccgatacccggtttgattttgaccagaggacgcttacccttaacttcaccgtaccgcaaagcgcgatgcgcgctctgccgcgcgggtacgtcagcccggagagctgggagtccggcatccctgccgcgtggctgaactatgtggtcaatggcgcgaataatgactaccggggcgagacgcgcacgcgggaacaacagctgtttgtgagcctcaacagcggcgccaacctgggcgcatggcggctgcgtgatttcaccacgtggaccaaagagagtaacgagctcacccacgtccagacctggctacagcgggatatccgcgccctgcgtgcccaggtttatgccggtgaaacgttcacctcatcgcaggtgtttgacgccgttggcctgcgtggggttgccctgaagaccgatgacaatatgttgcccgccagcctgagcggttacgcgcccgaagtgcgcggcatcgcgcgcggcaatgccacggtgacggttcgccagaacggtaacgtcatctatcaaacctccgttccgccgggggcgtttgtgctgaaagatctctatccgacctcttccggcggcgatctcgcggtcaccattcaggagagcgacggtagccagacgcaatacaccctgccctttgccagcgtgccgaatctggtgcgtaacggtcaggtcaaatatgctctgggggcggggaaataccgccctgcgggcaatcagatctcgccctccttcgcgcagggcgagctgttcctgggctggcgatacggcctcacgttttatggcggggcgcagttttccgatcgctacaacggcctggccttcggtatcgggcagaatctcggccgctttggcgcctactccctcgacctcacccatgcccgcagccagctggctgataaccagcactacaccggtgattcggtgcgcctgcggtacagcaagctgctgaacgatatcggtacgcgagtcaatttcttctcgctgcgttactcaacggcagggttttataccctcagcgataccacttacaaaggcatggcgggcggagcgccaaaacagaccgtggaagacgatggcaccgtcaccactcactacgacacggtttacaacctgcatatgtcgcgtaaggcaaaaaatcagctgctgttgtcgcagccgatgggcgaatacggcgcgctatcgctgtcctgggatcaacaaacctactggaatacgtcaaaaaccacgcaaagtttgcagttcgcgtggaacgcgacgtttcgtaacctgtcgcttggcatcagcgcccagcgtagctctggcctgtacgacaacaagaaagacaatatcctcgcgttgtccctgtcggtgccgctgggtaacccggcgctgtcgacccgtctccgttttaccgctacccatgcggatcccgctggcaccaccgccagtaccggtgtcagtggttatctgccggggcaggagaatcttttctatagcgtcaaccagcgctacagcgcgcagcagcactacggcggcgatgccgcgctgcaatacgagggcgcgtggggagactataacctgggctacagctacgccggtgactcccgcaacctcagttacgggatgagcggcggtgcggtgctgcatgaggatggtctgacgctgagccagccgctcgggaacaccaatattctggtgaaagccccgggcgccagtcatgtcgccgtgctcaaccacaagggcatcaaaaccgacagccggggctatgcggtgatcccgtacgccacgccgtatcgcgttaatcaggttgcgctggatgtcaccaccgtgggcaatgacgtggaacttgagaacgccatcgccaataaaatccccaccgacggggcactggttcgcgccaccctcaccacgcgtcagggggcaaaagcgatgtttatcgtacgtcacgctaaagacgtgctccccttcggtacgctggtctcgtcagaggatgacaaagccagcggtatcgtcggcgacggcggcagcgtgtatctgaccggcctgtcagcggagggaacattgcatgccgtatgggggcgcaacagcgcccagcgctgcacgatccgctatgcgctgaacccgcagaattatcacgcccgcaccgggctttattcccaggaggtcatatgtcagtaaccatccggttcctccccctgatcctgctgatgttcatcaccgttcccgcgcgcggctatgacgtgctggtttccgtgaccggcaacgtgatcggcaatacctgcattgtctcggaagattcgaaggagcaaaacgtgccgctgggcaccctcggcgtgaagcaatttagcgaggcgggcgcggtcagcaatatcaaaacgcccttcacgctcacccttgaagcgtgcggccccacctttgctggcgtgaaaatccgcttcagcggtacgccggatgacgagaacccgcagcttctgaaagtcgctgacggcggcgcgaccggcgtggcggtacagattctggataaagacagcgtacttatcccgctggacacccaaaccgctgcttacggcgcggcgggggatgacagcgtaaaaatgaccttctatgcgcgactggccgccacgggtgcgccggtcaatgccggagacgtttcggcagtggcaacctggacgacggagtatcaataatgcgtttactgtttttagccctgtttttcatgtcctctcaggcacttgccctctcctggacatcggatatcaccctttcgccaacgcccatgtcgtggtccggcccggcagactccatcgtgcctggaaagacgatcggctctgaatggagcgcctctgcgagcgtctcggaagtgttctggtgcggcctggtatttacctgctccaaagggacgctggagccgagcagcagtataaccgccaccggcatcacagttattcttgatggcgcaaattacatggtatttgaaacgggcgtgcccggcatcggcttcattcttgggcttaaagattataacggcaccacctatgtcccgatgcagacgggcattacgcagagctatccggccgatgggactaacggttacgccaccgcactgggctggtcggcaaaagtgacgtttatcaagaccggcgttccgctgaaatccggcgtataccagaccccgaccattaacgcggcgatcctgacggcctataacaacgaagtgaaaaccgcgcaggtgatcatcaaccccaccaccatcacggtgacggcaagcggctgcacggtaggcacgaaaagcgccaacgtcgacctgggcaccattgatattcacacgctgcccagcgtaggcagcacctcgccgtcgggggagtttaacgtcagcctgacctgcgatgagaacgtggcggttaacgcagtgatgaccgatcagaccacaccgtcaaatacctcgtcggtcgtgacgctgaccggggactccaaggcctccggcattggcgtacagtttttctataacggtaccgggccgctgatgatggggccggacagctcgtccgcaggtacgacgggacagtttttcatccagaccaccagctcggcacaaacgctgtccctgccgttccaggcgcagtacatccgaaccggtgaactggtccccggctcggccaacgccctggcaagcatcaccttttcgtatcagtaggttagtgcttcacccacaccagctgatcgacccggaagcccagctcgcgtgcggtgttcaggtagtcctgttttaccgcatccggaatggtcggggtgcgcgataaaatccacagatagtcgcggttcgggccgctgaccagcgcgtactggtacttatcatccagcttgatcacgttatagccgccgtagaacgggccgaagaacgataccttcagcgcagccgtggtcggttcgccggtaaagtacgcctttccttcgctctcattccattttttcttcaccggatcgtagccgcggttcagtacgctgataccgccatcgctgcgcttgccgtacgtcgcggtgacctgttccagaccgcgctcgaagcgattttccagtcgggcgacttcataccatttgccgagatagcggctggcatcaaagccggtaatgggctgcacgcctttcggcggcgtgggagatttacaggcaaccagcgtcagcgcaatggcgacaccggtaacgacaggccatagcctcatgagaactcctttcatttacgcggttggacgttaagtgtagcgcacccgtgcggcgcttcatcccgtcggggaatattcgtagtatattgagacaactccttctcttcggatgcagacatggcttactccatcggcgaattcgccagactcagcggcatcaccgccaccacgctgcgggcgtggcagcgacgctatggcttgctcaaacccgagcgtacggacggcggtcaccgcctgtacagcgatgaggacgttcagcaggcgctgaaaatcctcgactgggtaaaaaaaggcgtacccatcggtcaggtaaaatcactgctggaacgccctgcgccgcgccgcgccaataactggcaaaccctgcaacaggccatgctgcaaaagttgcaggaggggaaaattgagtccctgcgtcagataatttacgacgccggacgcgaatacccaaggccagagctggtcactaacgtgctgcgtccgttgcgcagccagatatcggccaacgtcgccgccgccatgacgctgcgtgagatcctcgacggcatcctcatcgcctatacctcgttttgccttgagggcgataaaaaagcgccgggcgataacatcctcatcagcggctggcatctgaacgacccctgtgagatctggcttgaagctctgacgcgcaccggccagggccaccgcatcgacatactgccggttccccctgccgcgctggccccggaaattttcccggaccgcaaatggctgctggtcaccagcggtaaacttaccgccgtgcggaaaaagcaggttgcgcagtggcagcagcaggtttcccttgaggtgattatcctctgattattttctgctgaggcaatcttcacgaaaagttgaatattttttcgcacagcgagtgctaacgttttcctgtcaccgacaactcaacaggaaaacacgatgaaaaagacactccctctgatgatgctcgctgcaatggctttcgcgcctgccgcgttcagcgccccggcaggcaccctgagcgttcacgttctggaccagcaaaccggtatgccgccagcggatgtggccgtcacgctggagaagcaggagcaggacaagtggaccccgattgccagcggtaaaaccgaccacgacgggcgcatcaaatcgctctatccgcaggatcaggatatggcgcctggcgtgtataaagtgaccttcaaaaccgccgattacttccacggtaaaaagctggactccttcttcccggaagtgccggtgctgttcaccgtcacccgcaccaatgaaaaactgcacatcccgcttctgctcagccagtacggttactcaacctacaagggcagctgattgctcttgattttaaagacgatttaaaaataatcccgccaatacttggacaaatacgcattgttgtgtaacttttaggtatgagatcgggaggtgcacaccatgacaacaaaacctgtgctgggtattagcggatgtttgaccggttccgccgttcgctttgacggcgggcataagcgtatgggctttgtgatggatgagctggcgcagtgggtcgctttccgtccggtatgccctgaaatggctatcggcctgcccacgcctcgtccggcgctgcgtctggtgatgaccaccggcggcgagacagaaatgcggttcagcaaagcgccgcacgatgacgttacgcagaagatggccgcatttacggcagattatctgccgaaaatcggcgatctggcgggttttatcgtctgtgcaaaatcgcccagctgcggcatggagcgcgtgcggctgtacgacgaaaacggcaaccggggccgcaaggagggtgtcgggctgttcaccgccgccctccttgaaactttcccctggctgcccgtcgaagaagacggtcgcctgcacgatccggtactacgggaaaactttgttgagcgcgttttcgctctccacgaactgaacgtaatgcgtaaaaatggcctgacgcgccgcgccctgctggactttcacagccgctataagcttcagcttctggcgcaccatcaggcaggctaccgtgaaattggtccgttcgtggcatcactgcacgagtgggacgatctggacgcgtttttcgtgacctatcgtgacaagctgatgaccatcctgaaaaaacccgcttcgcggaagaatcacactaacgtgctgatgcacattcagggctatttccgtaaccagctgaacagccgccagcgtggagaactgcgtgatgtgatcctgcattaccgggacgggctgctgccgatcctcgcgccgctgacgctgctgaagcattatctggctgaataccctgaccggtatctgatgacgcaaaactactttgatccctatcctgatgatttgggtctgcgtctggccgttacctgataagaaagaagcgaaggccctgttgatccacagaggcccaaagcagtaccccgtttagacgacaccctcactgtcgtcttttttttgcgctcagcgtaaaatactgtaattctgtacaggttaagcgtgcacagcggagtaccccgatgatcaaaaatttgcatattcagaactaccgctcaattcgcgatatgtcgcttgagctggaacagctcaatatcgtgttcggccccaacggcaccggaaaatctaatatttataaagcgatttacctgatgcacagcgcggcgcaggggcaattctcccaggcgctggcgaacgaggggggaattttgaaagtgttctgggcgggaaaaacccgcagcgaccagctgcgacgcatgaacctggcggtggaaacggaaacctatgaatatgagcttcaggtcgggttcgtggaaaagctgccctacccctcacagtttcagctcgatccggtgatcaaggaggaatctatctggctcggcggacagcaccgtcgcccgtcgtcacagctgatgaagcgtaagaatcaggcggtattcctgaacaacgtgcatcacgaaaaagtgacccacagcggtacgctgtatgagaacgagtcggtgttcggtcagctcggtgaaccgcacctctaccccgaagtgtcgcagatgcgcgagtccctgcgtaactggcgattctatcacgagttttccgtctcatccggctcggcgatccgtgccccgcaggtgggctttcgttccccggtgctggccagcgacggcgcgaacctggccgccgcgtttcagaccattgtcgaaattggcgacgagctgctgctgatgcgcattctcgaccaggccttccccggctgcgtgttttacagcgacaacaccggcgggcgcttccgcatgatgatgcagcgcgaggggctgagcagaccgctggaaccggcagagttctccgacggcacgctgcgttttttgtgcctggcggtggcgctgttaagcccgcggcctcccgcattcatcgccctcaacgaaccggaaaacagcctgcatccgcagatgctgcccgccctggcaagccttattgccgaggccagccgctactcgcagatctggctcaccagccactcgccggagctggcgcatttgattgagaagcaccgatcgttttcgctgtatcagttgtcgatggcggagggggagacgaagatggagaggctggggtaattgccaggtggcgctacgcttacctggcctacaggtttatggcttaaggacgacggtggtgcattaaccgccaaaataaccggtacacgtatgcattcccctatgctgatcattaaagaattcgactgctctagcccatatctttataaagcagttgcgacaggtcaaagcctggtgtcagcagaaataaaatggtatcggatcaactactctggacaggaaatggaaacggttgaactgcgttacgagaagattacctggaaacataacgacgggaacattatcttcagcgatgcatggaacgaacgccagtcagcatagaacgcacaaggggcgcttagccccttaatcatacaaccagcgccccgctttggcagactcaataatcatttcgagcgttagcggcttgtactgacgatctcgaaacttctttctaagcccaaactggtaccaaaaaagctcgggctcaaagtagttatccatgacaaagttgctgtgctcaatttcataccggttgaataggtcgagcagcatctcctccagatcttcagggacgaggttaaaatgctcctggaaggtccattccttaagggcaggacgcttacgttcactgtaattttcagtgatgtaatctaaaaactcttgctcatccggcaacaacattagaaataagtccaggcaatccgatctttcggtcggaatagaaaaattgcacgaagacagatgtgcgtcggtaattcagtagtgatatcggcacgcagctatgaggatcgcttcttctgtgatggcatagaccatgcgatgctcagaggtgattcggcgagaccagaagccagccaggttatgttttaatggctctggcttgccgatcccctcaaacggagtgcgacaggagattttgataagctcattgattttcttcaccatgcgcttatcggtctcctgccaatagaggtagtcttcccatgcctcttcagaccatgtgatcttcactcaataatgtccctttccttcccgccaccagatttcaagctctcgatagagttcatcagacgttttgcgtttgccggggagcgcatcaggtatgcggtttcttcaagcgagttgtactcttccagcgacatcagaacacaagattcaccgttctggcgcgtaataagcaccggcgcgcgatcttccgtcgtctggaccattgttgccgacaggttttgtcgggcttcactgtaactaataacacgcataagtacctccaaatgcattgtactaattattgtacaatgtatggaatccaatgcaaagtccaaccgtaaaccatacatggttgtaccggctcatatatgtcatgaattaagcttgccgcgagaaagtgcattgattagcaggtattgcgcagatagaggggtagcagacaaaaagaaaccgcctttagctggcggtttcttccccccccaggccgttaggagcagcgcgagcaagccataaagactcgtaagttaacaccttcatatagcttcaggtcaacgtgattactcagaccaagtaacccagagccgccccttcgggggcggcttttttatacctgttattcacatgaaacgggaaaaatcatccatcagaatgctattcccgtcacctgacagcaagaatcaggattacgcgtaagtgatcagctgggtggcattgcgaatttgcgtaatgttcatgggctatcctccggttggtatgagaaggagaatagccccagggtgccgttaagaatgtgggctaaagggcgatgatcgatgaaatcgggtcaatcgataaaccgcttgcgtaccctttccagcggcgcaatcagcagattgataagcggcttacgatcgataacgatatcggcgttcaccgtcattccgcccatcagcatgcgctttttcttgtccgggtcggtaaaccaggaggggacgcgcactttagccaggtagtagttctgcccctcctggagcgggatcagcgccgaatgggcatcaatgtttacctcatagaaatcggacagcgttgcctccacggaaccgtacttgtccacgggccacgagtcgaagcgcagcttgaccttatcgcctttcgccacgcgccccacccccgttgccggaacatacaggtacccctccatcgtcgccgcggtatttttacggatcaccactaccacctcgctattttgcgtaatggcccggccaggcgggaagttaatcgccaccacgtaaccatcggaaggggccagcatcgccatggtggaacttccccggctggacaggttgcggtcaatttcgctgatgcggtttttcacatacagctgctcttcgctcagagagtcaatttgcgactgggtgctgtcggtcaggctggtttttcgtgcctcaagctcaagaatagtgctctcctccagcgtcaggttgagctgcgcattgagcacatcgttgtggcttttatcgagatccactttggagacatagcccttcccggagacggatttccacgcctcgtaggtgtcggtgctgttttttaacaacgcgcgcagcttcttcaccttatcgcgggaaacggcgatctgcttgtcggtgagagccagctgctgcgccagatttttgcgatacgatgcaatcgagtcctcaatggcctggatgcgctgctcgctgcgcttcttctccgcttccatctgctggcggtcaaactgcaccaccgagccctgcttgccgccatagtcctgcgacacggtgaacagcggatcgttttccttcacgtactggcccggccgtacggcaaaatccacaagcgtaccggactcccgggcgcggacttccacatcgccctgcgccgggatcagcaccccgcgtgccagcgtggtttccgaaaagttaaagacaatcgcaaagaccagcaggcagagaaaaaaggtgatgaacaaggtcagcacggctttcagccgtggcgcgttgatgtgatagctttttgagaaatgatgcgggatcagcgcccgccgctgtcggcttcggttttttaatttcacgatatgtcatccatgataaatcactgaaagatcgtcccatgcactccagagcgtgggggttttgcgcagcgcgttcagcgtgtcggcggcggcctgacggtaatcctctggcacatacgcctgactctccagcccaaactccgccgtgtgcaacgaacagatcggcagcagcgttcggacgctgtagccatagcgcgataaaaaccgcgttgagacatccgttaaccacgccttttgatcccctgcctgggtggagaacagcggcgcatccggcaggcgttcgtccatcagcagcaccgtcaccaggcggtgaggggcgaaaaacgagctggcgcgtcggccttcgtgcgcggccattagcttatgcagcgcagggtgacgggtaataaactgaaagcgcacatcggctggcgcggtggcgagcagcgcatccacgatcagaccaaagcccgcccagcgcattcccagaagcagggtgcgagatgaactgtaaaacgcctgctcctgcgtccactgcgccacgtacgcgtgcagatcgaagcggacgttgcgcgcccaaagcgcgggcgggaagatctgctccacgaagttaaacccgctcagctcatgggcgttctgatgcagaaaatcagccgggacatcggtctccgggcagcgcataaactggctgtagttttgcgtgatccggtttgccagcagcgtgcgcccggcctggcgcgcgcagaggcgcgcatagaggcgcggcagaaacatcattgctcattctcccgcagggtgccattttccatggtatagagacgcccctgacagcccaccacgtccggcgagtgggtaacaaacaccaggccaatccccaggctacgcaggttcgccagcactttctgcgcggtcgttttatccaggttcgccgtcacttcgtcacagagcagaagcttaggctggctgtacagggcgcgcgccagaaccagacgctgcatctccccggcagagaaaaaggtgttccccggcagcatctccgtttcgtagccgtgcggcagcctggcgacgacgtggtccacctccgccagccgacacgcggcaatgacctgctctttatccggtgcgctgtcaaagcaggcgatgttgtccagaatcgagccggtgaagagaatatcgtccgcatggacgatgcggatgtgctgacgcagcgaggaaagatcgcactcctcaatggggatcttattgatccgcagcgtgccagacgatgacagcaacatgccggagatcagacgcagcagcgtggtttttcccgacccgctctggcccacaatcaccgcttcttcgccctgcttcagggtcatattgatatgctgtagcgtggcctcccggccaggataggcaaatgagacatcctcaaattgcagacagaccggcgaggtgacaatccgcttcccaaactggctggtttcagagggggcaaacagcaggtcgcccacgcgatccagcggccccttgagggcatttttgtccagcagcttctgcgccacctgcaccatggcatcggaaaaatagcgcttatagctgatataggcgtaaagcatcccgatgctcatctgcccttccaggatcaaccacgcgccaaagcagaccaccagcagctgctcggcattgatcaccagcagtgaagccacgtcaaagcgggccagcagccgctctttacgcatcagcccggcgatgtgttcgcgctgggatttatccatcaccgcatcccgggcctgctccatattgttcgctttgagcgtaatgatccctttctgcgtctccaccagcagggattcatactgggcggtgcgctcgatggagtcatccaccgcgcgttgataggggccgatcagcgaaaagcggatcaggaaaaacacgcccatcagcagcatcgtcagcagcgcaattttgacgttatacagcagcataaacagcaggctggtgacggcgatcaggctggaaaagataatttgcacgtaaccattgctgatgaactccgcgcaggcgtggagcgatttttcaatggccagcacgatgcccggcgggcgcgagcggaaccagctggtctgggtgcgcagcatgtagtggcgcacggactggcttaaatcgtcataggcaatgttacgcatcaggatctcaagcaactgcttgaggaatttaccgatgacttcaaagataaagacgatagcgaagatcgcggtgagcaggatcaccagatcgctgtcgctgcgggaaatggcctcatccataatcagctgcacgtaggtggggcttgccagcatggtgatgagggtaaaaatacagagcacaaacagcagcagctggcgctggaacaggctcggggatttattggctaaccggccaagcgtgagcttttcatccggggatttctttttgaagcacggcgtgggcttaagctcaagaacatagccggaaaagagtttttccgcctctttcagacggtaacgacgcacgccgctggcggggtcgtgaacggtcacgctgcggctgtcgatcttcacgatgaccacgaaatggttgccgcgccagaaggcgatgagcggcagctcagacgtttctatttcagtgatttcgcctttaagcacccggccagacatatttttatcgctggcaagggtcatcaattccgccattgaggttcccgcatcggcggaaacggaaatctcccggcgtagctggctgacggagacatggtggtcgtagtgccccaacaccatcgccaggcaggccagtccacattcggtaaattcatgctggcgaataacaggggtcttaccctgttttttatactgaaagagcgaaaacataatgatccgtggctgaaataaaaaaatggcccggcaatgcgggccatgcgtacaacgtgcttctcgcttaggcgctgaagaaaccgccgatgaagccgcccaccaggccgaacacgccgccgatggtgccgcccagcgcgcctaacatctggctgcccgcgttatagcccgcgcttgcgccctgaatagcggcagcaaacggatcccaaccaccgatgatggcctgtgcttttttgaaatcgataacttgcatgagtcttttcctgttaacgtgaattagttgtagctaccaaccagcgcacccaggaagcccattgcgccacccagaattccgccaaccacaccgccaaccatgcccatgatgcttgcgccggtgtcgtaacccagttgtgcacctttaaccagaccagcgaacgggtttaacgcgccaccgataatgtctttcgcttctacgaatgaaatcgctttcatttttatctcctgtagtgatggatctttagcatgatgctaaagcctaatttccttttatgaaggaaagcggttgctacgggcaggtggtaagcggaatgattttattgccataaataatcatccgccttgcagcctgcccggcattatctatttccagccgttgccccggcggaatatattttgaattgttgtattgcgtactgcacccgaccgaggaaacatatttaaaataggtattcccggtattactcaccaccccgttgctaaacgcataatcaaaatgtcgtgtccatggacggacaatcaaaatagcctcaagcgagaccaccacatccgactggatgcgctggcctttgcgcgtgataacctttgcctggagcggcgtctcggtgaattttacgcgatagtatcgctctttgttgtcatgcgggccggtataataaaatttaaaacccgcgcgttcaccgctccccagcgttaattgcttaggcgaatacatgacttcgccatcttttatttcggtttcttttcccttctctttaggaacgtctacctgaataagcgaaacggtataattctgacgctcgctggtatcgttttttatcggctgaaaaacaacttctctttcgggaagaaaatcaatattcagactttcgataattaaagcatttgcccctgtggaaatgaagcaatttattgcaaaaatagccaggaattttccagtcatggttgattaattccaggatgcgctaacatctattcttccctgcgcggtcacttcgccaaaccagctatttccgtcataggtggttttcgataccggattatccataacgaactggaggaccagcggtgttttccagagccacatatcggtcacgccggaactcattttgtcccactcttccgcatgggtggccggtgccgggatcgacagtacttcgcctttacagttgtgcgccatcagcgtctggcttttccccaccagcacgttgcccggaatgggaaccgtgaaaccgttgccgctaaaggcgcagtagtccaccccattcaggctttgggtaggcccggtgacttttaccgtgaccgcaatcgccgcatctttttgcgccccgctgtaggtgatggtgtaggggatctcaatgggcgcttcgccgataatacctttcccggagccgcccagaccgtcaggatcgagggtgtaatccgggttgtctggcacaatctccagcccgggctcgatagggttaatcaccaggccgccccccggctggaagcagaaatccgccgccagcgagctgttgccgggcgtcagacacaggctgacgatattgccaatgttgctgccgtcccccgcctgcgccacgctcagaattaacgctttcggcaaaaagattttaagggacgctttgccgccgtttttctgcggcgctgcaaggaaggtgttcgccaggacacgcgtatcgctcaggataccgccggagatactgtaccaggtgttttcatcgaaggtcagctcggcggcaagcccggtgccgccgctcatgtgcgattgcagcacgctgttgacgcgggaagaggtgagcgccagccccccgttgtaaccggagatatcctccccaacaaacgtgtattcgagcaggtcgcacaggacgccagagaccgtgttgcgggtgtatttggtgcaggtggcccccgttgatccatcgacaatcgtcacctcaccgctgatcggatcaatcccaaggttaagcgccctggcgttggtcatggtcagcgtgcccaccttgtgaagcgtattggtggtggtcactttgttgatagagctgatttgcggcgtggaggtgatggtcacttcatcccctggcgcggcgttgagcagatagttaaagaacggatcgcccagtacccagcgcccgtatgacgtgccgggctccatcaccggcggcttaaccaccatcgacgtgtcggtatagctggtcgtcggggtgtaccccgtgttgccgcaggacgaggaacacgccgtccctttgaagaacggagaggcgctggaaccggtcaccgaaaagtcgatggtcagcgcgctgcctgccggaccgctgtagctgttgtccgggatgtaagtggcgataccgttattcgttttcgcactcagggtcggccactcgcgcgaaccgtgtaaaaacgcggtcgacgtgctgttcagactaaacagccccgcgctgtttcccgtaccgttattgtccgggttattaatggctaaatagggcagctcctgcgcctgggccgccgcgctcatcagcagtaaattaagagcgaatatctttttcatcgtcacgttcctgcgttccttttgcttcctgccagacaaaatcgcctttgtcgcaggagatgtccccgagccacagcgcaccgcggttagactcgatgtccaggcgcacttcgcagacgctgtcgtccggcgtggcgatactcaggacagggttgttcttatcaacgtcgatcacgaagcgtccgtcgttttccgtccgggtcagcccgacatggtttttgatctgcatggcgccaaccggggccccgtttgcatccacaagacgaccaaacagggtgacgattttcttcacctgcggcttcatcaccacggtattacccggataaaccgtgatatggcgacgcgcattcgcgccaatctcatagctttccgtaccggtttcactgttcatcacttccaggtcataagcctggtatgccggcagcgacagccaggttttatcccctttgatgcgttctgcccggccgttaagcttcagggtcagcgcttcatcagatttgagaccggtactgacaatcacccctgcgctttcggtgcctttcccggcggcgatggcctctttggaccagcccacgctgccgtcactggtcagcgtggagttccagcctttactcatgccgctctggacgctgaggatgttgctgttccacggcgtgtcgaagttcacgctgccgccgccgcttacgctgcgatcctggcggctgttaaaggctttcgagacgttggcggtagccgatttcaggtaatcgccctcaaactggcggctggcgctgacgttcagcgccgtgccggtatcgcgattgtgggaaacgccaaccgacacggtattgccgagcggtatggcgaaatcgagcattacgtaacgatctttctcttcgtaatacccgtcgtatttgttacgcgacatccccacccgcaggcgcgccgtaccgtagcgaccggcgtataacccctgggagtagtccagctgatagcgtttatagcgatagaggtcgtcttcctgacgcatcaggctcaggttgcctgccgagggtaggccgaatgacggcaggctaaaggaagcgccccaggtgttgcccttgctctcatagatatccaggaacttgccgctggagagctgttcatgggagtaccacaccgagccgatctgccacggcaggctgagattcgccccatagttggcgcgatacgttccgtcggaggcggccatggtctgggtattcaccgagaaatagcccgtcaggttcagtgaggcccacagctcgctgacgatgtgttcccgcatcatgtaggtagaggcgttccagtcgaccatcccgctgcgcttgctgaacgaggctcccaccagcgacatggtgtctttatgtttggtgtcgtaatcgtagtagtaggtgttatcctgctcgtttttgcgtttcgcgtattttttataattgacgacggatttatcgcggctatacatcccgccccacatctgccagcgcagcgtttccgacacgttgctggagaacggtttatttacggtgtacatgctgcgcgacacggtgcggcttccgctcaccacttcaacttcgacgctgtagatcccgtagggcaggctgctggtgtcaatttcatggttgccgacgtcaaagcgctgaatgccgataagctgcccgtcacgacgaatacgggcctcgcccgccgtgggaaaatagaccaccaccggcgtcagagagagcgtgttatcgcgcttgcgggagttggcctggttgcccatggaaacgccgtagacttcaccgccggaaatcccgctgacgctcgccagagactgcatcgcccagccgttcagcatgcccgcggcgtagcgcatcccctgatagtcgcgctcccacataaccgcgttcatctgggtatcgctgctgttctcgttgacgtagccagagccgtcgatcaggacatgatcgacgcccattgagatccagtttctcgcgttcagatagcccgacgaccagctgtcaccgtagccgctctcggtgtgatacgctccgaggttgtaggagaacgtgccgctcaggtcgtcagactccggcgcatcaatgtccacctcacgcgggcgaatattcaccccgtagtcactctgcgacagattcagcaacaggcgcatttttttctgatccagttcgaacgccgaacccgcgctaaccggaatacgcatctggtcatcaaactgcttatcgttaatgctttgcagtaacgcccgcatctcttttgacagacgaatgccgttatcagactcctggacctgaacatccctcagccccagcttcagatcttttgcaaagagcgtcacgtcaccgatacgaacatattcgttcgccgtgccttcgtggttcccttgttgtgctgagtgtggacgcgtattcaccagatagacgggaattttgatcccctgctccagcagtgcataaagcgagtcgggaaaacggtaattagcgataaccacggagcttgaggctgcatgcgcaagcgcgggcagcgtgccggatgcgcaagccatcatcaccggcaacactaatttatttttcaccatgcatccttacttaacaggaatgaactgtttcaggtcccatattccgagatgaaaatggttatccgtaacgttgatatcctcgatagcgcgcgaggtctctggcatcaggtagaagtttttgctacacggcgtgccgggggattccggattcggcttcaggcaggtcccggtcgcattgacgcgaaacgaggtgttccctttattggttatttttcccgccacatagacgaaatcaatcttcttatcccggggctgaaccaccagaatggtgctcaccaccgcacgcgtcatcccggtgccgttttttggcgaaccgctgtccacctcttcgcttaccccttcatccgtgaaggtaatgcggtagtaacgctctttgttatcggcgttcccgtgatagtaaaatttgacgatattgctggtaccggcgggcattaccatgcgcgtgggcgtcagcaacagttcgtccactttctccggattaatgacgatcccttcatccattgggctgctgatccgctgtgcgcgaacagaaacaatacgcacgctgtctgcttcgttttttatttccttggcggtggagtcagcatccgcagaaataatggtggtgacttttcccacattaatggccagcgcggaggaagagataaataataaaaataagaaggtggatttgaggttaaacatgctatttccctaaacaggggcttgcgcccctggatcgatcaggccttagccccaggttgcgcggaacgcaacagacacggtcccttcccacaggctgttggtcaggtctttgaactctttcgcagtacccgcgttgtcctgagcggagtcaacgtagaagacgaatttgtcctggccggtaatttcggtatctgccgccgcgcctgcgctggtggtcaggttccacaggccagaagagacgccggtgttagaagaagaatcaaccagcgtggtccatgcggtcgatttcgcccccacggtgccaccgatagagcccaggtcgttaccgccccaacgcgcacccactttcagcttggtcgcttcaccacccacgctgaacagcgtgttgtttgaatcgtcgaggatagcttcgagtttgaagctggtcgccgtagagtgatcgccacggatagccacatcaaacagaccggtatcggtgttgaaagatttggtattggcgctgtaaacgaagttcaaagcacgcgttggcgtaacaaccagatcggattcgctgtctttggtcgcggttgcctgccaggtggcagaagccgtcgtttcagctgcattaactgcgctcagggcagaaacagacagcagggagcccagaacgatagcgttcagtttgttcatttatttagtccttcaaaaagaatccacgtgtataaaaaggggagcccctttttcgaggcggagtatagacagccgcaaaataacgaggcaatacagaaaaattcactcgacggatagcaacaataaaaatataaataaatttctcgtatcttattgttacgtattgagtaaattactcaatttcccgagtaatagataaatatcgatttttcaataaagagaaatatcaggacgtcgggacagctacacacatcattacaggcaacaccagccccttaattaaccacgcattgttttttacgctggtaatatagaagaagttgatattatcaagtaacatttcgtttacaacgccatccggcgccgcatcatcttcagatttattcagctttttatccttaatataaaagatattgctgccgtcgaccttttccacgctgagcgtgtaatttctgtcaatcaggtagcttttgccctctttcttgagtacgcctttatgaataaccgtcacaacatctttgttgttaaacaggaaaagcgtggttagcgacatatcggttgactcacccgtggaataggttttccaggaaatggtatctgactggcagccaaacccctcatcctgcgttctggtaaaatagacccataacaacgcgatgacagacagcgccagtacgatactgaacagtacactcattttagtccttgacatattttaactcccggtcaggcttctgtaagaaatgcagttcttataatcgtcgatactgtcctgctgataacagatggccaggaaataattttctatctgcgactttttaaacctggaatagtaagcatctgcaacctgatgttgacagtcgatatgttgactggcgatgacctcttttacgtgattaaagtagtgctgtcgcggctgatacatattcttatcgatcaggtatatcgtacacctgtccactttaccgagcagatgcatatcagaatctttcaggctctcggcataggaatcccgctggtgcaacagtaaaacagcggtgccggtaacaataatcagtaataacgtgcagagagaaataaagagtctgtgcagcgatattatttgtttaggcggatcggcatctttcttatgcgctagcgtatcgaatgcttcagaggcagattcttcgctaagcgttgaaataaccggcggcctgaccgtgtggtgttcaatatgcgcggcaaggctaaatcccttgccacgtatcgtttttatcagtaaagggtcgcagcctaatgtacgaaatgcttttctgatttcacttatggcaacattcagactcaccgaagaaccagagaaaccatgatcctcccagaccttctttatcaggtcgtctctgtcgagtgttttaccattattgatgataagttcataaagcagacgacccgcctggttagataacttaatggatgactcttcctctccattaatcatgatcataccggtgtcgacttcataaagcattgtaagatcaatgagatacttcatattattattacgccattgttaaatttttgtgcatttgccaggcaataataagtctaaagtttgtgtggtcaagtcgcgtgatattaattgagagatgaattcataaagcttcattaattaacgattattaaagcattaataaaaatcttcgaaccaacgcatttaggttaaaacattaaaaaaaacatactgacaagattataatcttaaactttagaagttgttggaataatgttttgttatgtacttttttagtgcaacataatatcgtcaaagcattctcccgagtcgccatgcgtctagccggtacatcagggacatgtgtagccgattaacattcattttaaataacacaaatcttcatggagtttatcatgttcaaatcgatcatgaccgtatcactgctggccgccgctattgcctctaccagcgcagtggccgcagacaattcggcgggtggtatcattaactttaccggcgctattaccgatacaacctgtaccattaacggcggtaaaagcgcggactttaccgttgcgctttcccctatttcggtaaaagatgcgggcaccacggttggcctgatcacccgaaataaaaaatctattgcgctgacattctctggttgctcaccagcagccggaacgaccggtaccccgctgaaagtttatttctccagcgcggataatatttccactgacggtaaatacctgctgaataacagcgtgaacgaaagcgatgccagcgtggcacgtaatgtcggctttgcgttagtggagccaggttcgtctacgcctattaccctgaaccagccttacacgacaaatattatgggtacagcgaccgcgccagattccgaaacgctgacgctggacgtttattactataaaacaaacgccgctgccgccaccgtgggcgagttaagctccaacgtaacgtataccatttcctacctgtaatagtgattattcaggctctgttttcgcagagcctgtatttaaggttgcaatcatgcgcaaggcaattttgctggcaggcttactgctaagcacgggtcactcatgggccaatattgtcattaatggcacccgtgtcctttatcctgaaaataacaaagaggtgatcgtccagttaatgaatacgggcgatgcgccggctctggtacaatcctggatagatgacggtgatattaattccacgccggaaacagccaatgtgccgtttctgttgtcgccgccggtgataaaggttaacgaacataatggtcaacagcttcgtattaaaaagctgccgtccagcttgcctgcggatcgcgaatccgtctttttcctgaatgtcctcgacattccgcccagacctgaaaatctgcaaaaccagaataccgttcagctggcgattaaatcccgtatcaaacttttttatcggcccgctgcgctgaaaggcacgctggatgacgcggtggcgaaactgacgctcgccgccgacggcgatcgctttcgcattacaaataacagtccgttccatattacggtcgccaatatttcgctgggtaaaacgaaattgctccaggagtccccgatggtttccccgtttgggcagctgacggtcgccgccaaaaatacggttaagcgcggacagaccttccagctgatgtatgtggacgatcttggcgcgtataaaacccgcactttcaccagtcagtgatcggaaagactcaccatgaaaatgaaacaaaacagactctgtctgctggcagtctgcacgcttctgctttcgcataaatcaggggccgtctcgtttgatccctccctgcttgctggcgcatccggtgagtccgatctgtctcgcttttccgaaaacaacgccatgcctgccggcagtcaggagatggatatctacgtaaacggcagctggaagggacgttataccgtcatctacggcgagcagcgtgacgacatccgccttgcctggaaagatgcccggtcgctgggcatcaacaccacgtccgtgcctgcgcccgccattgcgcacgggcaggtccagctgcgcgatctggttcagggcggtgaagtcaaaaccgataccagcaccctgagtctggcgcttaccgttccgcaggcggccgtgcagcgtactgaagaaggttacattgccccccagttctgggacgaggggatcccggcgctgatgctctcgtggaacacgacctggtacaacacccgcgcgaaaggcactgcgaaagacacaaatgatgatttttatgccgggctggattccggcgccaacctgttcggctggcagtttcgcgacagcagcgcctggcggaaaaccgccagcggagagagtagctggcagaataatacccgctacctgcgccgtcccctggcctcgctgaaatccaacctgacgctgggtgacttttatattcctggcgatctgtttgattccctgcgcgtgcgcggcgtgtcgctggcgtcggatatgaagatgcgcccaaattcacagcagggtttttcaccggtggttcacggcgtggcacggacgaacgccctggtgaaagttatccagaatggcaacgtgatctatcaggagaacgtgccgccgggccagtttaccctcgacagcattcagcctaccggctccgcgggcgatttgctggtggtggtgcgtgaggcggacggttcacagcagtccttcacggtgccgttttccgccgtgcccgggatgctaaaagaaggggtgagtcagtacagcgtggtggcgggtaaagtgcaccagaacacgctcgatgccgaacccgcattcatgcaggccacgctgcgctacgggtttaataacctcatcaccgggtataccgggacgattattagcgataactaccaggccgggcttgtcggtaccgggtggaaccttccctttggcgcggtctcgtttgatgtcacccacgccaaaaccaccctacaggatcgcaccagcagcggtcagagttatcgcgtgtcgtacagcaaatttatcgataccactgccaccaacttcactctggcggcctatcgctattccactaaaggctattacagcttcagcgacgcgctctattcgcgcgaagggtatcagcgcctgagagcgcagtacgacgactatgaagatcggtttggcgttgcgcccgacatgtcgctaagcacctgggacgccctgcgcgcggcgcagcccaagaatacctttacgcttaaccttaatcagcgcctgctcaataactggggcacggtgtttgtctccggcacacagcgcgattactggaactcacagcaaaccacgcgcgaatatcagatgggctattccaacgccatcggccgcgccagctataccctgtcggccagccgggtacggaacagggacagtgaagaagagacgcgcctttacctctccctcagcctgccgttctcgctgtttgataataatgcgtggatcacctccagcctgacggccagcgattcgcattacgagcagagcaatatcagcatgagcgggaacgcgctggcgtcgaaccgcctgagctataccctctccggcagtaatgcgcgtgggggtaaaaatgcggcaagcgttaacgccgcgtaccgttcgaacttcgcgacactcggtggctcttacagcgaatcctccgactaccgccagaccgggctcagcggacgcggaagcctggtggcctacccgtggcacgttctcgcctcaaacgaaaccggcacaaccatgactatcgtcgatgcgccaaaggcggaggggctgatggtgaacggcgatgaaagcattatgacgaaccgcgatggcgtagcgctggtgccttacgccaccccgtatcgcaaaaacgccattacgttaactgaaacggaaaacagcgctggcgcggaggtgatcggcaatatggctaacgtggcgccttatgacggggcggtgagttatatccgcttcgaaaccgataagcgccagtcatgggtacttcatgcgacgcgcaccgacggcaaaccgctgccgtttggcactgaagtgctggatgaacacggtggatctgtcgggtatgtcggccaggccagcgtactgtatatccgtgctgaacagccgccacgcgcgctcaacgtgcatctccgcagcggaaagtgcgaaatctcctccccggcctgggggctgaacagcccctcatcggtttgccattaattacggattatcaaaatgttacgatcattcatgttcctgctcctcaccagcattagcgggatgagctatgccacctgctccggcagcagcatcgtttatggcacaccgattaccattgatttatcggataagctgagcccggccacgcccacatggaccggcagcttcaccacccagtacagcggctcgttcaactgtacgacgggtaacagtgaattttcttacacgccgatcctgtcgaccgacagcaaatacgcgaccatcctcgggttcagcaacaacaagtatatggtgcgggcggagatcaccaatcccccggccaataaaaccctgtcagccagcggtagccatacggcgtctgagctgaacacaccgtttacggttcgcttcaccctcgttaaccagagcggtaccaccctgacgggggatacggcgaacatgagcgacgttctgttcgtcagcgacatgagcgggttatccatctgggaaatcatcacctggccaatcaatcaggtcatcaagatagcgcagtggttattcagcgggttcaagtggccttacgacaaccgagatatgtttggtcaaccgatgatcatcaaatacgcgccgaaactgactacctgttcctttgataatgcggggctgaccgtggcgctgccgacgctcggcattccccagctcagtgcatcctcacagccggggctgacgcctttttcactgaacatgagctgtcagaacgtcggggttaacggcaattccgatcggtcaattgagatgtttctgtccagcacgcagctgctctcaaccgacagctcggtgctgatcgacagcagcagtagcgcggcgcagggcgtggggctccgcctgataaaacgtgacgccccgcaaacgccggtgaccttctctacctcaaccaccagccgtggcaacgccacgatgattttcagcgtggcggctggcgcggcgctggacgaacatttcacccttccgatggcggcgtactattacgtgtgggcgcccgcccaagtgagccagggtaagatcaatacatcggctacgctgaatattatctatccctgatgtgaactattcctccatctttccaaccgcttgcacatacttaatcagttcgctgtggttggaaagattcagctttttcattgcattgtgtttctgtgtcgcaatggtactgaccgaacggtttcgatgacgggcaatctccgtcgttgaaaatccttccacgataagatgaagcacctcccactctctggccgagaggatggaacgcgcccgggagccggaccgcattacccgcctgagccacgaagagatcgacggtttttgcccgtccgccatgagcaacgcgggtaattcctttttcagttcagtcaattcatcctgctgactgatggttaattcaaatttcatctccagaactttttttaacagcccgtaaggcagctcgggcaccaacagaacacgcctgacgtgatgggttttacataaagatgtaaaacggctgctgacctccgcactccactctttatgattaagcagataattaaattcagtgaagaaaacatccacgttattatccgccaccgccgccagcgcctgttctgtggaatcgacctgagtaatgttcagtacgtaatcgggtaaaagatcctggagcgcccggaatattatctctttaaatatatttattttgtaaaacaccattacccttacgatacgttcagtattattcatgtcttttctaaattctcgtgaccggaggaaaatgataatagtttatgtactcaccactcacaacctcttcgcgccaggattttatccttctcaggattaaaaatctgaacaaggacattaaattcatagaaaaaattctattttattctgcacgccgtttcccctcgcagataaagccctgtcgataatcctgccacgatcacaatttttcttacaggaacagcagtaaatcactgaaaaggcggtggattaaccccattaatcaaccttctgatgcttattatccgctcatttacagaataaaaatctggcatgaatattattagaagattaaaacaattgcatataccattaaaaccatttttcaattttatcttccgctaataattggcttcagctttactcgacggtttgtattggcttacattgatgccatcgcatcgcgttatttaaaaagtgctcgctattcttttaataagagagtgcgaaccgccattttctcttatatggactgtttactcagcgaaaggagaatgccaatgcaaaataaaaaaacaattcacgttgccgttgttgacagctgcgaattcacgatgattggcctgcaatcgcttggaaagcgtgagcctgatgaaaaacacgacgttattttccatggatttacccatatcgaagaacttgctatgagtgaacaactctttgatatcatcatttatgatccgttgaatacgcgtcatttccgggtgacgacgaatgacgacattctctgtattaaacagaaacaagtgacagcgaagatctatatctattcgttatccgccggctatttgaaatttaaacatgttgatggagtcatcagcaaaagagtctccctgggggatatcaaagcgctgtggcaaatactgatgagccagacgccgcaagagtctggccgttacaacgtaggcatgacgacccgcttacgcaccccggcgaggctgtccagcgaggaggcaagcgtactgcgcggctattcctgtaatctcaaaaccaagcaaatcgcccgtcagctggggtgtaacgtcaggctggtttacttttataagaacaacgccatgaacaagcttaaggccgtgcgtggtccctcgttttaccagagcattcgctggatcctgaattaaaaatttgaccgtgtgtcgtttgccttttgttcccgtgtccgcgggaaccttttttcatttcctgaaggctgttccatgtataccgttcttccctctcccctgttgcaacgtatctcagggctgcgattccagccgcttgtcgatcttcattcgggccaggtgttcgcgcatgaagttctcgtggagatccataacgtcaatcttgaggtgctgtttgcctcgctgccctcgcgcagcgcgctgcaaatcttcttctggcaggccaacaccctgttacagatacccgcccgggacgcttactggctaaaccttccggcagaacaccttctcaacgaacgcgctatccggttgttgctggcgttacgccatcagcagcggttaacgattgaaattcaggatcccctcaccatcacacggctgagcgaggatgagcaacgtcgccttcatgccacgcttgttcggttaaaagaggcgggatggcaaatctggctggacgatttaacccgggagttggcggaggcgttcgcgcggcttgcgctgccgctggatggggtgaaaattgaccgctcagcgctgcgcgagcgcgcgccgcttgccccgtttgtacaggaggtcagggcaggtatcgcgcaatcaattcttatagaaggcatcgaaaactcgcgggatctggcgcgcgcccgcgcgtccggcgcacagtctggtcagggttttctgtggcccgaaagccgaaccgatgcccgcgtaacgctttgacggccagcggagcgctggcctttttaccggggcttaccagcccggcaccgcgccaccgttaaaaatggtctccgccgctttcgccacttccggcgactgataggactggataaattccttcacgttttcggcgtctttgttctcttcacgcgtgaccacaatattcacgtagggtgagtttttgtcttcgataaagacgctgtcgtgtaccggagaaagccccgtttgctggagataggtggtactgatgatggccacatccactttcggatcgtccagcacgcgcggcagctgcgccccttccagctccataatctgtaagtttttcgggttcgcggtaatatccagcgccgttggcagcaggccaacatccggtttaagggtaatcagcttctctttttgcagcagcaacagcgcgcggccaaggttggtgggatcgtttggaatcgcaatggttgcgccgtccttcagctcagagaccgatttaatctttcgggagtaacccgccatcgggaagacgaaggtattggccacggcgaccagcttgtaattgtgcgccttgttatcttctgcgaggaacgggcgatgctggaagacgttggcgtccagttcgccctggttggtggcatcgttgggtagcagcgagccgctaaagcccaccagctcaacatccagaccgtatttctcctttgccacctttttggcgacttccgccacgtcctgctcagcgccattgatcacgccgactttaatgtgtctggcatcattgccgccctgatcacagcccgcgagcagcaggccagtcaggagaagcgcacccaatcgaagtttcacgagacagttccttttgatagacgttttgaagactatatcgacaacgagacggcaggctaaaaaacgaaaaggaatcagtaagacggttaagttatatgcggcctgttgccgggtggcgctgcgctcacccggcctacgtgacgggggaagtgtaggcccggtaagcgtagcgccaccgggcgatgggcatcaggctacggtagtccaggcgcaagcagaaccgcttccctcacgcctgccgacgcagcggcgcttcgcgcaaaaaccacgacagcacaaacgccagcaccataatccccgccgccagcatgaataccgcatggatcgccgagccgaacgcatccagatagtccagacgcagggcatcaggcagatggtgtatggcaacgggattaagttcgcgcggcagttccgccccttccggcagcctgtcgatcaggcctgattgcagaatatgggtgaacaccgcgccaaacagcgcaacgccaatcgccccgccaatggaacggaacagcgtcaccccagacgtcgcgacgccgtattgatcggctgacacgctgttctgcaccgccagcaccagcacctgcatcaccagtcccagccccatgcccagcacgccggtaaacaggtacagctgccaggttggggaggtgattgaaatgcgcgtcagtaataccatccccaccacgccgagcagcgtgccgaggatcgggaacagacgatatttcccggtacggctgatgatgcgcccgctgataatggaggtgagcaacagcccccccatcagggggatcagctgcaaaccggcctgcgtcggcgtggcgtcttttaccacctgtaaatagagcggcaggaaagtgacggagccaaacagcgacatgccgataataaaaccgatcaggctacagagcaggaagctgcggtcgcggaagagcgacagcgggataatcggctcccacgccagccgctcttcgtagataaacccggcgatccccgtcaggccgaaggccagaatacaccacagctgcgggtcgctccattggcggatcgtcccgccctcggtggtaaacagaatgatgcacagcaacgccatgctgaggtaaatcgcccccaggtagtcaatctcatgcttgctgcgccgcgcgctgccgtggaaaaccgcgccaatcaccagcagggcaaacagccccagcggcaggttgatgtagaaaatccagcgccaggatgcgtgctgaacgataaacccgccgatcagcggccctatcaccgtcgccaggccaaacacgccgccaaacaacccctgatagcgaccccgatcggcaggcgggatcacgtccgccacggcagccatgctgatcaccatcagaccgccgccccccagcccttgcagggcgcgcatcagcaccagctgggtcatgttctgcgccagaccgcacagcgcggaccctacaagaaacagcacaatcgcgatttgcagaacgatttttcggccaaacagatcgccgaatttgccgtacagcggcaccacgatggtcgaactgaggatataggccgttaccacccacgagagcttatccagcccgcccagctcaccgacgatggtcggcagcgcggtggagacaatggtctgatccagcgccgagagcagcatcaccagcaggagtgcgctgaacagcagcttaatcgacggcgcctttttcgcaggttgagtcattacgtcggactccataagacatcacttgaaattaattaatcgtataattaatatttgtggaagtgatgaataagatcaagagatacggtgaccatgccagcacaaaaggacaattctgaaccccgccgccccggtcggccacgcggcggcaagcgcgttaccgccagccgtgaacagctgctggatatcgccctgaacctcttttcccgccaggggatcgccaatacgtcgttgaatgccatcgcccgcgaagcaggcgtgacgcccgccatgctgcactactacttcaactccagagaacagttgctggatgcgatgattgaggagcgcttcctgccgttacgcgagcggatcggggcgattttcgccgacaaccgggattcgccggtggatgccctgacggaaatggtcagggtgctggccgaactggcggaaacgtatcgctggtttgcgccgctgtggatgcaggaggtgattggcgagatgccggtactgcgcacccatttgcaggcacgctttggcgatgagaaatatcacaccacgctggcaaccatcaaaggctggcagcaggaaggaaagctgaacccggcgctggctcccgaactgctgttcactacgctgctgagcctggtgctggtgccgttctcccgcatgcgcaatgacgagaggctaagcgccctctcgccggagatcgtggtgcgccacgtgttagccgtgattggcaccgggatcggcggttaaagatgtttggtcagatagtgtctctgcattccctgataagggtaatcctgcaaagacatctgcacctgataaccctgtttttcatagaacggacgcgcctggaagctgaccgtatccaccagcgcgtgacgacagcctttgcgacgggcctcctcttcagccgttttgataagctggcttcccacgcccgtaccccgcacgctgtcgctgacccacagatagtcgatgttcagccagtcgcctttccgtacgccgattaacccgcccagcatgacgccattgtcgtctcgcatatatacgccaatatcgccgccaaacgtcgccagatctaaaaactgcgcgttataggctcttagccccgttaataattcttctttttcttcggctgtgacattatctgtaatgctcagatgcataattctctccttattttcagcgcaatctgaatatctcacagcttaaccttcataaaaactccttattttctccattgtttatagctggaaatattcattcaatatgtaaataaaaaaagcctttccaatagtctccgaaaacgtataatgagaacgatcattctcactttttacggtagccgacaatgagtacaaagctggaagaacgacaaaaactgcggcaggacgaaatcattaccgccgcgcgccgctgctttcgcgccagtggatttcacgctgccagcatgtcgcagatcgccagcgaagccaggctcagcgtcggacaaatctatcgctatttcagtaacaaagacgcgattattgaagagatgatccggcgcattatcgactcacgtatcgaggagatgcagggcaaaaccctggttgaagggatgccgcaggcgcttgcctggcgccagacgcttaacgaagacgatgacgcgctgatgctcgaaatgtccgcagaggccacgcgcaatccgctggtggcaaacatgctgatcgaagccgaagcccgcatgttcgccaacgcctgtgagcacctgaaaaagcagttccctcacctgagcgatgagcatattcgctgctgcgtggagattaccgccgtgatgatcgaaggcacgatttaccgtcgactcacgcctttaaaagtaccgtcagaacaattagagcctatataccagaatattttaaatatgattttctctgcgaagtaatcgcatgtgaataattagcggaaataagtaatttcccttttttcatttctggctcagccagagatgcaggatcgctgtgcttttaattaaccctcctccctgttaagcaattaacagggcaggcttcgttcaccctggaaaaagattatgaaaaccataacaacctccatcgcggcattactcctcctgacagggtgcgataatgcgcaaacatctgctccccagcgtcctcttccggaagtggggattgtcacactcatgagccagccggtgtccgttgtcagcgagctgaccggacgcaccgccgccgcgatgagcgccgaagtgcgcccccaggtaggcggcattatccagaagcgcctgttcaccgaaggnnnnnnnnnnnnnnnnnnnnnnnnnnnnnnnnnnnnnnnnnnnnnnnnnnnnnnnnnnnnnnnnnnnnnnnnnnnnnnnnnnnnnnnnnnnnnnnnnnnnnnnnnnnnnnnnnnnnnnnnnnnnnnnnnnnnnnnnnnnnnnnnnnnnnnnnnnnnnnnnnnnnnnnnnnnnnnnnnnnnnnnnnnnnnnnnnnnnnnnnnnnnnnnnnnnnnnnnnnnnnnnnnnnnnnnnnnnnnnnnnnnnnnnnnnnnnnnnnnnnnnnnnnnnnnnnnnnnnnnnnnnnnnnnnnnnnnnnnnnnnnnnnnnnnnnnnnnnnnnnnnnnnnnnnnnnnnnnnnnnnnnnnnnnnnnnnnnnnnnnnnnnnnncttccagctaccgcgccgcgtatgatgaagccgccgccgcactgaaacaggcgcaggcgctggtgcaggccgactgccagaaagcccggcgctatgcgcagctggtgaaggacgacggcgtatcacgtcaggatgcggaagacgcgaagtccacctgtgcgcaggacaaggccagcgtcgagtcaaagaaagccgcgctggaaagcgcccgcattaacctcaactggaccaccgtcaccgcgccgattgccggacgtatcggcatctcctctgtgacccccggcgcgctggtgaccgcccagcaggataccgcgctggccaccattcgcgggctggacagtatgtacgtcgatttaacccgttccagcgccgatctgctgcgattacgcaagcaaaccctcgccagcaacagcgatacgctgaacgtgtcgttgatcctcgaagacggcagcagctacagcgaaaaaggccatctggcgctgaccgaagtggcggtggatgagtctaccggctccgtcaccctgcgcgccgtcttcccgaacccgcagcatcagcttctgccgggcatgttcgtccgcgccagagtggatgaaggcatcatgaatgacgcgatcctcgccccgcagcagggcatcacccgcgacgccaaaggcaccgccaccgcgctggtggtgaacgccagcaacaaggtcgaacagcgtcagctggagacgggcgacacctacggcgacaaatggctggtgctgagcggcctgaaggcgggcgataagctgattgtggaaggcaccgataaagtcaccgccgggcaggaagtgaaagctgaagagatgaaaaccaacggaggaaacgcctgatgttttcccgtttcttcgtgcgtcgcccggtctttgcctgggttatcgccattctcatcatgctcgccggaatgctggcgatccgcacgctgcccgttgcgcagtacccggacgtggctccgccgtcgatcaaaatctccgccacctataccggtgcctccgcacagacgctggaaaacagcgtgacgcaggtgatcgagcagcagctcaccgggctggataacctgctctacttcacctccaccagcagctcggacgggtcggtgagtattaacgtcacgtttgaacagggaaccgatccggacaccgctcaggtacaggtgcagaacaaagtccagcaggcggaatcgcgcctgccgaccgaggtgcagcagtccgggatcaccgtcgaaaaatcccagagcaacttcctgctgatcatgggcgtatatgacaaaaccgacaccgccagcagctcggatatcgccgactggctggtgagtaatatgcaggatccgctggcgcgcgtggatggcgtcggtagcctacaggtgttcggtgcagaatacgcgatgcgcatctggctcgacccggcgaagctggcgtcgtactcgctgatgccctccgacgtgcagagcgcgattgaagcgcagaacgtgcaggtttccgccggtaaaatcggcgcactgccctcgtcgaacgcccaacagctgaccgccaccgtccgcgctcagtcgcgtctgcaaacggtcgatgagttcaaaaagatcatcgtcaagagccagtccaacggtgcggtggtgcgcatcagcgacgtcgcgcgcgtggagatgggcagcgaagattacaccgccaccgcgaagctgaacggccacccggcggcgggtatggcggtgatgctctcaccgggcgccaacgcgcttaacaccgccacggcggtaaaagataagatcgccgagttcaaaaagtcgatgccggaaggctacgatgtggcctacccgaaagacagcaccgagttcatcaagatctccgttgaggacgtgattcagacgctgttcgaagccattatcctcgtggtggtggtgatgtacctgttcctgcaaaacatccgcgcgacgctgatcccggcgctggcggtgccggtggtgctgctgggcaccttcggcgtgctggcgctgttcggttactccatcaacaccctgacgctgtttgcgatggtgctggcgatagggcttctggtggatgacgccatcgtggtggtggaaaacgtcgagcgtattatgcgcgacgaagggctgcccgcccgggaagcgaccgaaaaatcgatgggcgaaatttccggcgcgctgatcgccattgcgctggtgctctctgcggtattcctgccgatggcctttttcggcggctccaccggggtgatttaccgtcagttctcggtcaccattatttcggcgatgttcctctccgtggtggtggcgctgaccctgacgcccgcgctgtgcggctcgatcctgaatcacaccgctccgcacaaaaaaggtttcttcggcgcgtttaaccgcttctacagtaagaccgagcacggctatcagaacaaggtgctgcgcgccctgcgccgttccggtggcatgctggtgatctacgccctgctctgcggcgcgatggggttcgccatgctaaaactgccgggcagcttcctgccaaccgaagaccagggtgaaatcatggtgcagtacaccctgcctgccggcgcaaccgcggtgcgtaccgccgaggtaagccgccaggtacgcgagtggttcctcaccaaagagaaagccaataccgacgtgatcttcaccattgaaggcttcagcttcagcggcagcggccagaacgccgggatggcgttcgtctccctgaaaaactggtcagagcgcaaaggcgaggaaaacaccgcccaggccattgccctgcgcgccacgcaggagctgagcaccattcgggatgccacaattttcgccatgacgcccccggcggtggatggtttaggccagagcaacggctttacctttgagctgatggccagcggcggcaccgaccgcgacgcgctgctgaaactgcgtaaccagctgattggcgaagccaaccaggacaactcgctgcacgccgtgcgcgccaacgatctgccgcagatgccgcagcttcaggtggatatcgataacaacaaagccgtgtcgctggggctctccctgagcgatgttaccgacaccctctccagcgcctggggcggcacctacgtgaacgacttcattgaccgtggccgcgtgaaaaaggtctacatccagggcgacagcgactatcgcgcggtgccatcggatcttaacaaatggtatgtgcgcggcagcgacagcaccatgaccccgttctccgccttcgccaccacccgctgggagtatggcccggaaagcctggtgcgctacaacggctcggcggcgtatgagattcagggcgaaaacgccagcggcgccagctccggtacggcgatgagcaaaatggagcagctggcgaataacctgccgtccggcagcacctgggcatggagcggtttgtcgttgcaggaaaaactggcaagcggtcaggcaatgagcctctatgccctctcgatcctggtggtgttcctgtgcctggcggcgctgtatgagagctggtcggtgccgatttcggtcatcatggtgatcccgcttggggtgcttggcgcagcggttgccgcctccctgcgcggcctgaacaacgacgtctatttccaggtggcgctgctgaccaccatcggtctgtcgtcgaagaacgccattctgattgtcgagtttgccgaagccaaagtggccgaaggctactccctgacgcgcgccgccctgcgggccgcccagacgcgtctgcgtccgatcatcatgacctcgctggcgtttatcgcaggcgtgacgccgctggcaattgccaccggcgccggggccaacagccgcgtggcgatcggtaccggtattattggcgggacgctggccgcgacgctgctggccatcttctttgttcctttattctttgtactggtgaaacgtctgttctccggtaagcacgcaaaccggaggtcataatgtttcgtgtaaccgtattaacgttagcgctgctgagcgcgggctgtgtgtcattagatcccacgtatcagcgcccggacgcccccgtcccggcgacgttgccgggcgcccatggcgaagccaacgccgtggtgagccagcggcagcaggtgatgaatgatgcgcggttgaaaagcgtggtgacgatggcgctcaacagcaaccgcgacgtgcaaaaagcgattgcggatatcgacgccgcccgtgcccagtatggcgaaacgcgctcgtccctgttcccgacggtggacgcggaactgagccacacccgcagccgcacgctggcgagcggcgtcgcgacaagtgacgaagccaacggcgcggtctccagcttcgaactggatctgtttggccgcaaccagagcctgtcgcgtgccgcgcgtgaaacctggcttgccagcgaattcaccgcgcagaacacgcgcctgacgatggtcagcgagctgaccacggcctgggtgacgctggcggcggataacagcaatctggcgctggcgaagtccaccctggagagcgccgcaaactcactcaagattgtgaagcgccagcaggaagtgggcgtggcagcggcaacggacgtcagtgaagcgatggcggtttaccagcaggcgcgcgccagcgtggcgagctaccagacgctggtgatgcaggacaaaaacgctctcaacctgctggcgggcgatacggtgcccgagaacctgctacccggcacgctggagagcctgagcgacaacgccatcacgctgatcccggcgggcgtcagctccagcgcgctgctgcgtcgtccggacattcaggaggccgagcataacctgctgagcgccaacgccaacatcggcgcggcgcgcgccaacttcttcccgaccatctcgctcaccgccagcgcgggcgtcggcagcgattcgctgtcgtccctgttcagccacgggatgaaggtctggtcgtttgcaccttccatcaccctgccgctgttcagcggcggcaacaatatggcgcagctgcgctatgcggaagccgagaaaaaagggttaattgcgacctatgagaaaaccatccagagcgcgttcaaggacgtggccgacgcgctggcccggcgcgaaacgttgagtgaacagcttgatgcccagcgtgaatacgtggcggcggagcaaaaaacgctggatgtggcgacgcgcagttacaaggctggcgcgggcgattatctgacggtgctcaccgcgcagcggtcgctgtggtcggcgcaggaatcactgattgccttgcagcaaaccgacctggaaaaccgcatcacgctgtggcagtcgctgggcggcgggattcagtaacatcactgccgggcggcgcaacgttgcccggccatcagagtaaatacctatggcaaaactctctttttctttcgcggccatccttggcctgctgacggcgatcgggccgctgtgttccgatttttatcttccggcgctgccggagatcgccacccagctcaacacctccacaacgctgacgcagctttctcttacctcggcgctgattggcctggggctgggacaactttttttcggcccgctaagcgatcgcatcggacgtaaaacgccgctgctgttctcacttttgctgtttgtactggcttcagtgctttgtgccagcacgcagaatatttacgccctgatcggctggcgatttgtgcagggcgttgccggggcgggcggctccgtacttgcccgctctatcgcccgtgataactatcatggcacgatgctaacgcagttttttgccctactgatgacggtcaacggcatcgcgcccgtggtgtccccggtactcggtggctatatcgcgtcgcatttcgactggcggatgctgttctgggtaatggcaggggcgggtctggcgctgctgatcgccagccagctttttatccgcgagtccctcacagagaaacagggcgggggatcgctgacgcaaaccgccaggacggtacttaaaaatcgtcgctttatgcgctactgcctgatccaggccttcatgctggcggggctgttcgcctatatcggggcatcctcctttgtgatgcaaaacgagtatggcctgagcgccatgcagttcagcctgctgttcggtgtgaacggtatcggcctgatcgtctcagcgctgattttctcccgtctggcacgccgacacccggcggaagggttaatgcaaataggtctggttttggccgtaacctgcgcggggctgacgttgctctttgcgtggatgcagctttccgttccggcactgattgcactctttttcaccgtcgcatttaacagcgggatcagcaccattgcgggttcagaagcgatgagcgcagtcgacgcgaaggagtccggcacagcgtcagccattctgggcatgctgatgtttttattcggcgggatcgcagcgcctctcgccggtatcggcggagaaacgatgctgaaaatgagtctcgcggtgttagtaagctatggcattgcactaacgatcggatctcgcacgcagaatgcgtaaattcatacttttggcttgaatcgcgttgatgaatgtaacgatatatttcaggggaagcatgtgactttcaaaggaggtttcgatgaaatctgcacacctggtttgcctgctcgtttgcctgattttcgctgcgtttgttcacgcgcaggagaagagcgctccggagaaagaggcccagataaaacagcaggtcctgaaagatgttaagaaaacctgtaccccgcagaaaaagcagagcgataaggcctggcaggcgatgattttgtcgtctgaggccaatcagctgctgatcaaaaacgccatcaccgccgtgaagcgtgacagcctggacgcctactgggatgcagtaagtcaggtggattgtatggaagattactgagggttgagcgccgggtggcgctgcgcttacccggcctacatcacacgtttaacgcttccgcacatccggaataatcaaatcaccgcgcagaacgtaggacccgagcatctgcgttttctctgtcagccagctcacgatgcgcgccgccatggcgtccatggaatactcaatggccgggatcaccggaatacccggcagatgcagcgaaccgccgaggctgaaaaccatgatgtcttccggtaccgatttattaaacgcctgtaactgcgggatcacccgctgggcttcctgctcatccgccaccagcagcgcgttgaagttcagcgtggacgcgttgttgagtaattcctgaagcgcaacggacgatgaagtcgcgtccataaacacgaggttgcgattaaagggcaggaagtttttctccagcgcgtgtttgtagcccagcagcacctgatcggcaaagccgctgccttgcgggtggatcagcgctatctggcgacgcccctggctggtgagatagttacaggccgtttcagccgcgaacgcgtgatcgaactgaatactattggcgttatcggcttccatacagtcgaccagaatcacgttgtccatgtccacgtccagcggaaaacgcgcgccaatcaccagaatgtcatcacataagccgcaggagagttcttcaagggcgttcatcacttctgtttttgtgtgtgcgaaacgcagcagcagatgtttttgatgctggctgaggtgtttttccagcgcgtacaggtaaccggtggtctggttaatgttttcctgcgcgcaaatcaccccaatgcagcccgtcgactggctgagcagcgactgggcgatcacgttgggacgatagttcagctcgtccaccgctttcagaacagcctggcggctggcttctttaacgccacgcgacccgctcaacacccgtgataccgtggctttggacaccccggccagacgcgatacatcgttgattgtagacatctctctcccctgtcagacgcaactggcgtctgtaatttccatcaccgctacggctcacattatagccagaacggagtatatccgtttccgttttccatggaaaccgattttccgtttccactcaatttgatgccaaaacagccaaattatgtgacccacatccggttaattagcctcataagtaagggatcttgatggttgtcacacttctgtattttataaatggaaaccggtttccgtatcatgtccaatcatcctcgcaataactttttacattttgaggatggttgtcgatgttcaagattatgctgtgctgctctgccgggatgtccaccagcctgctggtcagcaaaatgatcgatgttgcaaaagaacggggcttgcccgtgaagatagatgcgtatggcgtatccgaatttgatacgcagtttccgcactatcaggtggtgcttctcggaccgcaagtgaaatacatgttaaagacgctctcagacaaggcagcgacgcaaggcattccggtgcagcccatcgacatgatggattacggcatgcagcgtggcgataaagtactggactatgctctgtcgctcatcgaagcggcacactaaaaggtgttcacatgagttcgttatatcaatccatggtcgcggtgattgagcagtcaattacgccgctggccgcgaagctcggtcagcaaaagtatgtgattgccatccgcgacggctttaccgctgcgctgccgtttatgatcatcggctcgtttatgctggtgtttatcttcccgccgttttcggcggataccaccaacagcttcgcccgcggctggctggatttctccgagacctaccgcgaacagctgatgctgccctttaacctcagcatgggcgtgatgaccttcttcatctcggtggggattggggcgagcctggggcgtcagtttaacctcgatccggtgatgtccggcctgctggcctttatggccttcctgctggtcgccgcgccctatgccgatggcaaaatttcgacccagtatctctccggtcaggggatcttcactgcgcttatcaccgcgatcttctccactcgcgtctatgcgtggctgaaacagaacaacgtcaccatccgcctgccgaaggaagtgccgaccggtgtggcgcgttcgtttgagatcctgatcccggtgatggtggtgatcggaacgctgcacccgctgaacctgttcattgaagcgcagaccgggatgatcatcccgcaggcgattatgcacctgctggagccgctggtgtcggcgtctgactcgctgcccgccattctgctctccgtgctgctgtgccagatcttctggttcgctggtatccacgggtcgctgattgtcaccggcatcatgaacccgttctggatggcgaacctctctgcaaaccaggcggcgctggcggcgggcgcggcgctgccgcacgtttatctgcaaggtttctgggatcactacctgctgattggcggcgtaggctccaccctgccgctggcgttcctgctgctgcgtagccgcgttacccacctgcgcaccatcggcaaaatgggcgtggtgccaagcttctttaacatcaacgaaccgattctgttcggcgcaccgatcatcatgaacccgatgctgtttatcccgttcgtgtttgttccgctggtcaacgcctgcctggcgtacggcgcaaccaaactcggctggctggctcaggtggtttcgttaaccccgtggaccacccccgcgccgattggtgcgtcgtgggcggcgaactgggcgctcagcccggtggtgatgtgcctggtctgtatggtgatgtccgcgctgatgtacctgccgttcctgcgtgcctatgagcgtacgctcatcaaaaacgaagagcagaaagctcaggcgaccgtcggtaacgctgaagccgccagcaattaagtcaaagaggaagagtcatgaaatacgcatttcccgataacttctggtggggcagcgcaagctccgctctccagacggaagggacacgagagggtgaaaccacgtgggattactggtttgcccgcgagccgaaccgttttcacaacggcgtggggccgcagcacacctccacgttttatcagcactggaaaacggacattcagctgttaaagcagctgaaccacaacagctttcgtacctcgattagctgggcgcgcctgatccctgacggtatcggtgaagtgaacccggacgcggtcgatttttacaatcaggtcattgatgagctgaatgaacagggcatcacgccgtttatcaccctgttccatttcgacatgccgatggcgatgcaggagattggcggctgggaaaaccgtgacgtggtggacgcgtacgcccgctatgcgcagatttgcttcgagctgttcggcaaccgcgtgctgcactggtttaccttcaacgagccgattgttccggtggaaggcggttatctgtacgacttccactacccgaacgtggtggattttcgtcgggcagccaccgtggcgtatcacaccgtgctggcccatgcgaaggccgttcaggcttaccgcgccggacactacgcgggtgagatcggcatcgtgctcaacctgacgccgtcgtacccgcgctcccggaacccggcggacgtgaaggcggcgcacatagcggacctgatgtttaaccgcagcttcctcgacccggtgctgcgcggggagtatccggcggacctggtggcattgctgaaatcttacgatcagctgcccgcctgcaagccggaagacggtttcctgattgcggaagggaaaatcgacctgctcggcgttaactactatcagccgcgtcgcgtgaagtgtcgcgacagcgcggtgaacccgcaggcgccgtttatgccggagtggttctttgataattacgagatgccgggccgcaagatgaacccgtaccgcggctgggaaatctacgcgccgggtatttacgatattctggttaacctgcgcgataattacggcaaccctcgctgctttatttcggaaaacggcatgggcgtcgaaaacgagcagcgctttattgaaaacggccagattaacgatcaataccgcatcgattttatttctgagcatttatcgtggctgcacaaaggtattagcgaaggctgcaattgccttggctatcatatgtggacgtttattgataactggtcgtggtgtaatgcgtataaaaaccgctacggttttattcagctcgatgtagagacgcagcagcgcaccattaaaaaaagcggagagtggtttgccgccaccgccttaaataatagttttgataaagagtaatgatgatgatcgcactagaagaagccgtaatggaaattatcgtcaacgccggccagtcccgcagcctgtgctttgaagccctgcacgcggcgcgtcagggcaaccttgacgaggccaaaagcctgctgcgcgaagccgacggctacgcacgccaggcgcacaagatgcagaccaaactgatcgagcaggatgcgggcgaagcccgccagccgatgaccttaattatggtgcacgcccaggatcatttaatgaattccttattagcgcgcgagttatccgaagaaattattcatttatatcagagataatctatggcgaaataattactgtaatacctctgtaccctaaatagagatccacttgttctgatgatagcgacatactctgtcagatcggagcgggatggttattgtctgaataaaattaaactatattgagataaccatgaatacgattaaaaaacttccattaaccatggcggttatcgccgcgctttgcccaatttccgttctcgctcaggaattcactcaggagcaaatcgacgccattgtggcgaaagcggtggataaagccctggccgagcgtcaggccaaaatggacgcggcggtcgcgaaaaaagcggacgtggtgaccgagccgcagagcgcggcgcaatctccggatatggcgatcccgttcggggttaaatttaccggctacgcccgctacggcgcgcacttccaggctgccgatcagaaatacgtggcggtggacggctcctacaacggcgcgtccgctattggtcgtctgggtaacgaaggcaacggcggcgagttccagctctctaaagccttcaagggcgaaaacggcgccatctgggacatcaacgtgatgatcgaccactggggcgacgaagttaacctcaagaaagcctacgccggcgtgaccaacattatggcctccaacccgaacgcctacttctgggcgggtcgcgacttccaccagcgtccgcagcagggcatcaacgattacttctggatgaaccacgacggtcagggcgccggggtgaagaacttcgatatcggcggcgtgcagtttgacgtggccgccgtggcagcggtggaatcctgtagtccggaagtgatggaagacgaagcgaacccgtcgcgcatcacctgtaccggcgggtccggcacgggcgacaagggcaactacgccgccacctccaaaatccacggcatgaagctcggtccgctggatctggagctgtacgccaactacggctttgactcgaaagccgttgagagcgacgaacgtctgaacgcctggcagggtggcgtggtgctgagtcataccaacgacagcggcgtgaacaaggtaattgcccgctactccgataactcggacaacagcgtgttcaacaaaaccgaggatctgaccacggtctacgccagcttcgaagggctgtacaaattcacccaggcgacgcaggtggagtacctcctcgccttccatgactacgacaacagccgcgataagaccgacaaccgcaagaactacaacgccatcgtgcgcccgatgcactggtggaacgacgttcactccacctggctggaagcgggctggcagcacgtggattacgacaacggcggcgacaacaagggctggaagctgaccctgtcgcagaacatgtctatcgccatggggccggagttccgtccgatgctgcgcttctacgtgaccggcggcaaggtggataacgaacgtaccgcgcgcgtgaacaacaccaaagatgagacgctggacgacttcaacgtcggcgcgatgtgggaggcgtggttctagtagagcgtcgtttgtttcgcccggcggcgctgcgcttgcacgggcctacaaggttttgtaggccgggtaagcgtagcgccacccggcaagatcccatgttatgctacaaaaaaaccaacataacaggggagaacatgggttccacacgcaaagggatgctcaacgtcctgatcgccgccgttttatggggcagttccggggtttgcgcgcagtacatcatggagaaaagccacatctcttcgccttacctgaccatggttcgtctgctgtttaccggcgtgatcctgctgacgctctccttcgttcacggcgacaagattttctcggtcatcaaaaaccgcaaagacgccctcagcctgctgtttttctcgctggctggcgcgcttaccgtgcagctcaccttcctgctgacaattgaaaaatccaacgccgcgacggccaccgtgctccagtttctgtcgccgacccttatcgtggcatggttcgccctggcgcggaaaacgcgtcccggcatatttgtcttatccgcgattttcacgtcgcttgtgggtaccttcctgctggtgacccacggcgacccgacgtcgctctccatctcgcctgccgcgctgttcttcggcatcgcctcggcgtttgccgcggcgttttacaccacttatccatcgacgctgattgcccgctacggcacgctgccgattgtcggctggagtatgttgattgcgggattaatgctgacgccgttctacgccggacgcggcaccaccttcgtgatcgacggcggcctgctgctggcgtttttctacctggtggtgattggcaccgcgctgacgttcagcctgtatctgaaaggcgcacagatgatcggcgggccgaaagcgagcattctgagctgcgccgagccgctgagcagcgcgctgctgtcggtggtgttgctgggggtggcattcaccctgccggactggctggggacgctgctgattgtgtcgtcggtggtgttgatttcgatggattcgagaagacgggttcagacatcggcgtagcctgatgccctcaccccaaccctctcccacgggagagggagaaaagcactacttcgccttaaccttccccgccaccagcagcgcggtcagcagcatcagcgtgccggaaattaccagcggcgaggtcagccccaggtggtcgagcgctacgccgcccaccgccgcgccgcaggtattcgccagctggatcaccgccacctgaatcgacccggctttttccgcctgatcggcaagcgagcgggtgatccacgtcgaccagcccaccggcaccagcgcaaaggcaaagccccagataatcgcgatcgccgaagccacccacttatcgctgccccacaacaccagcaccgcggcgctgatcgccagcaccagcggggcacccgccagcgccaccttcagggagcgcttcaggaactgggacgacagcgaggtgccgacaaaactggcgatcccgaagctcagcagcaccagcgtcaggccgtccacgtcaaagcccgccatggtcatatacaccgggcggatataggtgaagaaagcaaactgcccggcaaaggccatgaagatggcggtcatccccgccagcacgcccgggcgcttcagcagcgcgaacatgttctgtttgtggtgcgccgcttcccccggaagggacggcagcgccttccacacccagataatgcacagcacgcccatcaccgccgccgcgttgaacacgttacgccagccgataatcccgccgaggaaactgcccagcggcgcggcgatcaccagcgcgatggagaccgcgccgaagatgacggacaaggcttttggcaccgtacgcgcgggcaccaggcgcatggtcagcgaggcggacatcgcccagaagccgcctaatcccagccccaggcaggcacggccgagcagcagcagggtgaagctttccgcgaaggagaccagcaggcaggagagcgtcagcagcacgctgaacagaatgaccaccttgcggcggtcaatggtgccaatcgcctgggtgataaacaggctggcgaacatcgccacaaacgcggtgacggtcaccgactgccccgccacgccctcggaaatgcccagatcctgtgccatcggcgtcagcaggctcaccggcaggaactcgacggtgatcaggcaggcgacgcaaaacgccacggagaaaaccgccgaccagttggggcgtgaaacctctttggcctgcggtgtggtcgtgggctgggtatgttctgtcatggcatcacctgaagataaaaacgtgcggaaaagtcgcgcagtttatcatcaaaagtgtgacgaatttaacgtttcgacaacttttgtcgtttttaatgccgggcggcgctgcgcttgcgccggcctacgggcttgtaggcccggtaaacaaagcgccaccgggcaaaattacccgcgagccttaagagcggcattcgctaatcccacgatccactcctgatgcccgttaatcattgggttcggcacggtgcgcgctaattcctgcgccggcacgcctttctgcgactcctgagtcagaatgcgcacgcggtttcccggcaggtcttcaaacagccaggcgtggatcacgtccagacgcgaattcgcatccccttctacccagccgtgccacgcgatacgcgcggcttcgccctccacgggcggaacatactccgtcacctgcgcttcaaccgggaagccgaaggtggtgaagcggaagcgggcgttggcgctcagcgccgggccgctgccgtcgtgaaaacggatatcttcggcgttgctgtagtagttcggccacagggtggtgtcgttgagctgcgcccaaatctcttttgcgctcagcccggcgacgatgatttcgttggaggcaaagttatcggtgctgccgggcaggtagtcgttcggccagataatggcggattgtttcatggttcacctcatcggttagttgataaggtgatggtgcgcctgcgggtgatataaatctaatgacgatgctttatactcttcatcacgttttgtgatatcagtgcaggtaaaacacgccctcttccggcaggaaaagctggttgtagcgcagctggaaggcgttgaactcctgcgggtctggctctatctcgcgcataaagccgagcgcgaggcggatttgcgcgtcggtgatcggcgcggccagacgggctttacgcagcatgcggtgccaggtatgcagattctcttcgctggcgtcgacgatgcagacctgccagatcagcagcacctgggcggcattttgcagatgcgcctcgtcggggcgttcaagatagcggataaactcattgcccggcgttttaccgaactggtcaatcatcgactcgaccggcatcggggtgatccccagccgctcgcttaaacgtttgatggcgcggcgggagtctgaggtcaggacacgaaatccaaccacaaacaccacggcaagcgttgccagcattatccagaccatgcgttctccttagactagccgcccatcatagcgggaaacgcagtgcgtcaacagcgggcagcgccataatagtaaacggaaaagaggtgtaaaaacgtcatgaaagcggatctgcgcacgctggatcttaacctgctgaaaacgctggatgccctgctggacgaacgcagcgtcacccgcgcggcggcgcgtcttgccctgacccagccagcggtaagcggcatgcttaaccgcctgcgggattactttgaagacccgctgtttatccgcgcgccgcacggcatcgtgcctaccacccgggcggaagcgatggcggctcccgtcaaacgcattctggcagatatcgacgagctgcttcagccgatcgcctttgatccgctcaccgcaacgttcaccttcacgcttgccgcgaccgactacgccctgcgcgcggtcgtcgtgccgtttatcgctgcgcttaaggtacaggcgccgggtattcgcgtgcgcgtggtgcctgtggaatctgaccgtctggtcagccagctcgaacaaggctctgtcgacgtggcgctgatcaccccgcacaccacgccagatgagcttcacagccgggcgctttatgatgaacggtacgtttgcatgatgcgtgccgaccatccggatgccggacagcccatgacgttagaccggttttgcgccctggagcatgtgctggtctcttacgagggcgacggttttcgcggcgtaacggatggcgcgctggagaaaactggccgaacgcggcatgttggcttatcagtgagtaactttttagtcctgccggacgtgctggccctcagcgatatgattgccgttgtgccatcacgcatagcggaaaagcagacggggatgttcgtctgcgagacgccggttcccgtgcccggttttaccaaaagcatggcctggcacggcagaacgcaccgcaacctcgcgcaggcgtggctgcgcgggctgttgctggagaccagtcagcgcgcctgaagccctttcagcagcgcctcgtggaagcgtgcaggatcctgcatctgcggcgcgtggcccatgtcgttaaattcaaccagcgtcgcgtgcggaatgcgcttcgccgtctctttacccagcaccgcgtaattgccgagcgtcttgcggatctctggtggggcgagatctttcccgatggcggtgttgtccttcgtgccgatcatcaataatactggcatcttcagctcgttaaattcatagacgaccggctgggtataaatcatgtcgtagagcagcgccgagttccacgccacgcgcgctttgcccggcccgttgttcagcccggcaagcatggtgacccagcgctcgtactccggcttccactccccggcgtagtaggtgtttttctcgtactgacgaataccgtcggcgctgactttcagctcgcgctggtaccactggtcgaccgtaatatgcggcacgccgcgcgctttccagtcttcaagccctattgggttcaccatcaccagctgctccacctgctgcggccacatcagcgcgtagcgggtcgccagcatgccgccggtcgaatggccgataaccgtgacgcgatcaacgcccagcgttttcagcagcgcgtgggtgttatccgccagctgctggaaggtgtactgataatgctccggcttggtggatttgcagaagccgatctggtcgggtgcgatcacgcgatacccgctggctgaaagcgcgcggatcgtgccgtcccaggtgccagcgcagaagtttttgccgtgcatcagcaccacggtgcggccgttgggtttttccggcttcacgtccaggtaagccatatccagaggctggttctgcgaggtaaaggtaaagtgttttaccggccagccgtagtcaaaacctcccagcttctcaccgtaggtgggggcatccgcggccattgcgggggaggccagcgccatcagcagcgccaggcaggacaatcgtcgggtcaacatgcaagctctccgttagcaaaaagggctaaggctgcacgaaaagcggcagcaaaaaaaactgtagagcatacgggggagcgggtgtgtaaagcggggtaaaggtaaaaggcaggccgtgaaaaataaaaaagcccggcatcacacaccgggcaaagaagttacctgcacactcaggctacttttaatttctgcgcacgattctcgcggcggatcttacgctcttccagcaccgcaaccatcgccatcaggacgatacagccaatcgctgccgcatccagcgcggcgaaggtgcccgcccagccggtgaggccgaaaattggcgtgccgtcggcgatcatgcccagaccgagcttggcgaagctgtcgccgatcaggtaggcgaaggtgcccttaatcccatcggctgcgccgatcgcttttttcggcacaaagccaaccgccgccacgccgatcagcagctgcggaccgaacaccaggaagccgagcgcaaacagcgacgccaggtaaacgtactggttgctggcgtgctggtaaacgccgagcgtggcgataatcagcgccagcgcgacgcaggccaccagcgcgcgacggccgttggcgaggtccgagagccagccccacagcagggtaccgaccagcgcgcctacttcgaacagggtgaagccctgaatcgccacctctttcgagagcttcagctcctggaaggcatacacggtggaccactggtcgataccgatacgcaccacgtacaggaagatgttcgagaagcagagcagccagatcactttgtttttcagcacgtactcaacaaagatctgccatttggacatctcgttttcttcggtctctttgtcctcctcgctgatctcctccccgaacagctcttcagctttgccgaggccgtaggattccggggaatcgctgccgtagcgcaggccgataaagccgacaatcagggcgataatcgacgggaagataaacatgccaatcacgtggccgtcgaacaggtagttcgcaccgaacagcgccacgccggccgcgcccgctccgccgaggttgtgggagatgttccacatgccgaggtacgaaccccgcttgcggcgcggggtccatttggtgatggtggagtagctgcacgacccgccggtactctggaagaatccgctcagggcgtagaaggcgatcatcaggaacaggctgacggagcccgcgcccatgctggcgctgaagccgagcatacagatggcggagaggatcagcataaacggcaggaactgcttggtatttttgccgtccgcgtagtaggacacaaccgttttccccacgccgtaggtgatggagaagcccaggccaatcatccccagctgcgtcatgctcagcccgtaggttgagatcatgtcgttctgcgcgatgttaaagtttttgcggatcaggtacatggtcaggtagccgatgaagaccaccagataggactgcatgaacggtttgaaccacatcttgcgccgcacgtcgagcggcagatccagggtcggcttgcgcacctgatttaagaaggccagcatgactgagttactcctgagctgatttttgcagcattgtaaaaaccagccaggagagatgcctgagacagcgtccaggtgaaaccgggaaaatttcttagttttgcgcgtctcggcagcaaaaggtgaggcgcgtcacgcttcgcgcggtgcctgcgcgtgcaaaaacggcagcaacagcagggcggagatgcccgccgcgatggcgatcaccgcgaagaacccgctccagtgccagatgtcgatcacccgcgccagcggccagccggagagcgatgcgccaaggtaggcaaacagcccgacaaagcccgtcgccgcgcctgccgcctctttgtgggaacactccgccgccgccatgccgatcagcatctgcgggccaaagacgaaaaaaccgatggtgaagaagcacgccgcctgcatcacgtagctggcaaacggcatcagccacagcgaaccgacggagagcaaaatcccggcggcgaagatcaggttcatcgggccgcggttgccgttgaacagcttgtccgatccccagcccgccaccagcgcgccgataaacccgcccagttcaaacatggtcaccgccgagttggcggtcaccaggtccacgccgagagtttcggacatgtacaggttgccccagtcgttgatggccgcgcgcaccacgtagaccagcacgtagcagagcgacagcagccagatgtaggggtttttcagcacgtatttggtgaggatctcctggcgggacagccccgcgccttcctgctgctgggcgatctccatctcgtcgtgccgccagtcgcccaccggtggaaggccgacggtttgcggcctgtcgcgcaggcgccagcagaggaacagcccggcgacaatcgcgaggccaccggcaatcatcatccccgcgcgccagccgtagtgcagcgccgccgcgccgaccaccatcgggatcagcgccccgccgacgttatgcgcggtattccatatcgcccaccagccgccgcgctcgttgcgtgagtaccaggcggtgagcaggcgggcgcagaccggcgcgccccagccctggaaaaaggcgttcagcgcccacagcagggcaaaggcccacagcgaggtggagaaaccaaacaggatgttcaccacgccggtggcgatcagcccaacgcccataaaatagcgcgcgttggagcggtcgctgacgatgccggagaagaacttcgacaggccgtaggtgatgtaaaacagcgtcgccagcaggccgatatcggtgcgcgtcatcacgccgctggcgaggatttccggcgcggcggcgttgaagcttttgcgggtgaaatagaacagcgcgtagccgagccagatggtaatcaggatatggcgacgccagtagcggtagcgggagtcgatttccgctttgttgcttaatggggctgcgctggcgggggttttaaacatggtgcgtccttaacggcaaactgacgctgacgcgcgtcccgtgggtgcaggagatgttcagcgtgccgcccagcgcctttacgcgctcgcgcatgcccgcaagaccaaacccctgctggccggagcccggcggcaggccgcagccgtcgtcttcaatcaccagcatcaggcgctcgtcctgctgccagccctggatcgttaccgcgctggcgctggcgtgtttgacgatgttgttcagcccttcctggcagacgcggaaaagggtcacgcgctggccttcgctcagggtagcttcattgatgcgccagtcgagatggctgacaatcccgcggctctccagctccatctcgcgcatcagagagcgtattgcctgctcgagcgagagatcgtcaagctggcgcgggcgcagccgccctaacaggcgacgaacggaatcatagacgcccagcgaaagctgttcgatatgcgccccgccctgcttcacgcccgcgttttctgccgccaggcgctgaacaatgcccgcctgggtgcggatggcggtgatggtctggccgatgtcatcgtgcagctcgcgagcaacctcctggcgcacgctctcttccgtctccagcagacgctccgccagacggcggttgcgcgccagctcggcttgcagagactggttcagctcgcgcaggcgctgtatgcccgcgccgagcagcagcccggtcaggctctgggccagcagcgagagcagcagatctaccgggtgatcgtgccaggtctggctggcaatcagcgcgatggcgttcatcagcgtggcgatcaatgcgccctgccagccgtaatgccaggcaagggcgatgatcggcagcgccagacaaaacggcgtgaagcgtgataattcagcgggcagaccaagctgcaaccacaggctcaccacaaacagcagcagataccagatcaggtgccgggcgcgccagttcaccggctgggagaccagcgccgggccgagcggctgccagacggtgctggtaaggtaatgccagaaaaccaggcaggtcggggccagcgtcaggccgccggtgagggtcagcagcagggcgttgagcccctccttttcacccacccacggcagggactgcaacagcgcggcggcaatcagcgccgcaccctgacgcagcagcgtgcgccagtcgcgctggtgacggtagcgggaaatcagggcgaccgggataagcgtgagcaggcttccggtcatcaataaaggcaggtgcgcgagggccacttcctgcgccagccagatcagcatcagccactctgcgcccagcagcaccggccagtagccgcgcgggcattgcagcattagccccagccgcaggccaaaggggaacagcagcaccgccagctccgggcgctcgacaagatgcaggctgatactccacagacagaaccacgcggcggagaagataaaaaagctggcgacgacggcgatcagccgtgaaaacagggagttcattgccagctgtcaaacatacggcgcgccagctcgacatcgttactgacgttgagtttttccatcaggttggcgcgatgaacgtgaacggtctttggcgacagccccagctctacggcaatctctttcaccgacatgccctgggcaagtttctctgccacctggcgctcgcgtctggtgagcggatcctgccgtcccgccgccagcttgatggcaatatccggcgtcaggtagcagccgccggtggagacggtacgcacggcggcaatcagctcgtccgggctacagcgtttagagagaaacccgcgcgcccccgcgttgagcgcctgctcgaccagcgccgggctgtcgtggaccgagagcataatcgtcgccatccctttcggcagctggcttaacagctccagcccggagaggtccggcattgagatatcgcagatacagacctgcaccccgcgtcccggcagacccgccagcgcctcgcgtcctgagccaaactcggccacgacctgaaaatccggttcgaggtttaaaagctgggcaaagccggagcgaacgataaggtggtcgtcgataagggcgatggtggtcatggtttgatcctgatgcgtgaacgcgccggatggcggcgcaaacgccttatccggcctacgtgtaacgtccttgcaggccggataagcgcagcgccatccggcaaaagcctcttaccttaagtgatttactcaaaaaacaccgcaattttgttaaacatggtgggatcggactggttgcgtgccactttggtgacgtcctccagcttgtcgatctgcgccatcatctgctccagacgctggtcgtcgttcaccagtagccagatgcggctgtgctcgctgccctgaatcggcaggcacagaatgccttccacgttaaacgcccgacgggcaaagagcccacagacgtgggtcatgacgcctgggtggttgcggacggtgagttccagaatgacgttatcacattgtttctgcatggcttattcccccaccatctcagtatttgccgcacccggcggcaccatcggatacactttttgttcagggtcgatacgcacgtggatcagcgccgggccagggcgagaaatcgcatcctgcaacgccgcgtgggcatcttcttcggcgttcagatcgcaggtgtgcaggccaaaaccagcggcaatctgcataaagttgatcatccccggataggtcgccgcaaacacgccctgcttgtagaacaggctctgctgctggtgcaccagacccagcgcctcgttgttcatcagaatgattttgacgtctaactggttttcggccgccgtcgccatctcctgaatattcatcatcaggctgccgtcaccggagaagcagatcaccttgcggtccgggttggcgagcgccgcgccaaccgctgctggcaggccgaaacccatggtgccaaggccgccggaggtcagccactggcgcggacggttcagcggatacgcctgggcggtccacatctgatgctggccgacgtcggtggtgataatcgcgctgtcatccacgcaggcggcaacggcgttgataagaccatagtggctcagcgggtcgccctcggttgggatagcgcccgggaactcacgttgcagatcggccaccagctggcgccagtcggcgcggtcggttgcctccgtctgcgggatcagctgcgccagcacctcggccacgtcgccctggatcgccacgtgcggctgcttgattttacccagctcggcgcggtcgatatccacgtgaatgattttggcgttcgggcagaactgctcggttttgccgatcgcccggtcatcaaaacgcgcccccataactatcagcaaatccgcttcttgcaggatgtagttggtgctgcgcgcaccgtgcatacccagcatgccgagagagagcgggtgcgcttttggcagcatacccagcgccatcagggtcatggtggtgggcaaattagctttttcagcgaactggcggatttcatccgcggcgttaatcgtcccgccgcccagatagagcaccgggcgtttggcggcgttgatcatcgccgccgcatcgcgcacgctctcagcgctgaattccggcgcgggggcacggtcacccggctccggcagaacgtcgatctcaatttctgcggtctggacatccttaggaatgtctatccacaccgggcccgggcggccagactgcgcaatgcggaacgcatcgctgataacctgaggcagctcgctgatatcgcgaactaaatagttatgtttggtgatggggatagagatgccgtaggtgtcgacttcctggaacgcatcggtgccgatcatcgaggacggcacctggccggtaatgcagatcagcggaatggagtcgagacgcgcgtcggcgatggcggtcaccaggttagtggcgcccggcccgctacaggccatacagaccgccggtttaccctgggtacgcgccatgccctgagcgataaagcctgcgccctgctcgtggcgcgccagcacgtggcggatctgtgtgctttggcttaacgcatcatacagcggcagtacggtcccacccgggatgcccgcaacggtggtgatgccctgtcgttccagtaaatgaacaatcagctgcgcgcctgtaaaacgcgtcttggtggatgttgtgcccgaacttgccatgctccagtccttttcttctgagccagccttccggggagggtcctaaacgaaaaaccccgcccggtttgcgccggcggggttttggattcgtgtgttgatccagtccctacggcgcattgccgacgaccaccaccacacgcacgacgaccactgcggcaggttgcgcagtttttagtagggtcgaagtgaagatggatgaagtcattggggacctgtgtttggaatcattgattgaatttatacaaacacaggttttcggatgtgacaatggaaatattttcatctgcgcaaaaatgcgtcagggatcacgttttgtttgttgggtggtgacactcaataaagggtttttactcactcaataaataacgcaggtgataccccaaatctggccgccagctttttaatatggttcagggtaagctgtctctgaccattcagaacccgtgaaaccatcgatttactaccaatttcatccttaaaatccgatatcgtcagattgtattgatccatcaaggttcttaaaactgcaattccgacgggaacggactccatctccttgcgtaatgcgactatctctggccgattagcttcgtaacggctaattctggcgcacacaatatccagcaaggggctattgggctcgttcataaggagatactcaaccagctcaagcgcatccttataatctttctcgctcggctgttcacccagtaaaggaacggccgcaacaagggcgtgcgtagctttcattgcatcagcgacgatcatgatttcttccccttagtgcgatgtttctccgtaaaacggtcatattccttatgagtaaaaacatggcgcacataaaacttttggctttcaaagaatatgagagccactactctgagattgttatttgcaatatcaataacataatgcttatcaagatacttgaagttatccagcgttgggaaaagttttctcagtgcagcgggcgtcgggcagtggctcttttcaataactcgtcctaaaaagagaagctcttctctgtgttgcgggaactggcttaccgcatccaaaattgccttcattgagattaaatgcatcctgcttgcctgccgcgtccattgccattatggcaacgataacacctattgccaataagtcaacgaaggagactattttcacttcgtcagaaaacaaaaaaccccgcctaagcgaggtttttatcagggttttgcggtnnnnnnnnnnnnnnnnnnnnnnnnnnnnnnnnnnnnnnnnnnnnnnnnnnnnnnnnnnnnnnnnnnnnnnnnnnnnnnnnnnnnnnnnnnnnnnnnnnnnnnnnnnnnnnnnnnnnnnnnnnnnnnnnnnnnnnnnnnnnnnnnnnnnnnnnnnnnnnnnnnnnnnnnnnnnnnnnnnnnnnnnnnnnnnnnnnnnnnnnnnnnnnnnnnnnnnnnnnnnnnnnnnnnnnnnnnnnnnnnnnnnnnnnnnnnnnnnnnnnnnnnnnnnnnnnnnnnnnnnnnnnnnnnnnnnnnnnnnnnnnnnnnnnnnnnnnnnnnnnnnnnnnnnnnnnnnnnnnnnnnnnnnnnnnnnnnnnnnnnnnnnnnnnnnnnnnnnnnnnnnnnnnnnnnnnnnnnnnnnnnncagaacacactgtgttacgtcaacgcgaaaagtatacgcgatcgaagacgaacgcgcaattccggcacggattttgacgtttttaagtatggatcgccttccaaattttgtccataaaatactgttcatacatacagtatttatctatactgagggtgttcgcagtgagcgagggggccgcagtttaccggcgcaacgaagtcctggctgaaacgggtggtgccgtcagtgccttaacccctgaagtgagcacactgtgttacgtcaatccaggtgctggccacaggcggcggaaaggtacgccagcatcgtgctccttttaaccaaaaggagacgcgtatgagcgtcgtggatatggtcatacttgtcctcaaactcattgttgctgtattgcaactgcttgatgctgtcctgaaatacgttcggtgattcaggttcaagtcgcacctgagaggggcgggcaaccgcccctctttaataacgagggaatgctatgtcgcgtctgttaattgagcccgtcacgcccgatgaacccgggtatatcgccctgaaggcggagagtatcgcgttgaatttcaatatgctgcgcaggctggaagagaactggcagcggggtgaaaaccgctttaacgcgccgggtgaaaaactgctgggggcgtttcttaacggcaggctggtgggcgtgtgcggccttaatcgcgatccgttcagccagcagccgcgcgccggacgtattcgtcatctctacgtcagcgagaagtgccgtgggcagggcataggcaaacagcttttgaccgtggtgatggcggatgccagcatctggtttgattttcttaatacccatgcgccggaaaccgcgtacggattttaccatcgggcgggcttcaggctggtgtcagacgaaccccgggtgacgcaccgccttttttgcgcagtgtaagcggctggcagcatcgacgggtgaatgttacagttggatgacatttcaccaaccgatacgccatgaccatcaccgttttctgcattttactgttcgccgcactgctgcatgccagctggaacgccatcgttaaagccggaacggataaactctactcggcgatcggagtcagcggttcagccgcgcttattgccctgattttactgcccttctctcctcagccaactgccgcaagctggccatatttgttcgtctcctgtgcgttacaggtggtgtacaccgtgctggtagcgaagacctatcaggtctccgacatgagccagacctacccccttatgcgcgggacggctcctctgctggtggcgctgatcagcgtattggtgctcggggatcatctctcctggcttgcctggtccggcattggggtcatttgtctgtcgattctggccatggcgatgaacggccgcatgcagtcacgcaaggggatctggctggcgctgctgaacgcctgttttatcgccgggtataccctggtggacggcaccggtgtgcgactctcggacactgcgctgggctatacgctctggaccttcttcatgaacggtttctgcctgctgagctgggcaatggtggcgcggcgtcgcgaagcgtccagctacctgcgcctgcactggaaaaaagggctgctcggcggtgtcgggacgatgggatcttacggtctggcactctgggcgatgacccaggcaccgctggctgtggtcgcggcactgcgtgaaacctctattctcttcggcgcattaatcgcatttgtgcttttaaaagagaaggttgccggcctgcgcatcgcggcggcactgggtattgctgccggtgcggtcctgctgcgcctggcgtaattcgctggcaacattagttgccgatcttgtttacaaatcctgccttcacgtcttctgtcattcatcacagtaatgcttaaattgtcatctctctgtggtagattcctcgcgcatttatgggaatgcgtagtcacttattctttatttatctcttttggcaaaagtattcagcgacatgaaaaagcaacggaacgtgaacttattgttgatgctggtgttactggtggccgtcgggcagatggcacaaaccatctacattccggcgattgccgatatggcaaaagatctgagcgtccgcgaaggtgcagtccagagcgtgatggcagcctatctgctgacctatggcgtttcacagctggtttatggtcccctgtccgatcgcgtcgggcgtcgtccggtcattctggtgggcatgagcattttcatggtagcaacggtgattgccattaccacgcacagcctgaccgtcctgattgccgccagcgccctccagggcgtgggcaccggcgttggcggggttatggcgcgtaccctgccgcgtgatatgtaccagggcacacagcttcgtcacgccaacagtctgttaaatatgggtattctggtcagcccgctactggccccgctgattgggggtctgctggacaccgtctggtcctggcgcgcctgttacgccttcctgctggtgctgtgcattattgtcaccttcagcatggcgcgctggatgccggaaacccgcccaaaagacgcgccgcgcacgaagctcatcgccagctacaaaacgctgttcggtaatgggtcctttacctgttatctgttgatgctaatcggcggcctggcgggaattgcggtgtttgaagcctgttccggcgtgctgctgggcgcaggccttggcctgagcagcatggtggtgagtattctgtttattctgccgatcccagcggcgttcttcggcgcatggttcgccggacgtccgaacaagcgtttctccacgctgatgtggcagtcggtgatcagctgtctgctggccgggctgatgatgtggatcccggggctgtttgacgtgatgtcggtctggacgttgctcatcccggcggcgctgttcttcttcggcgcgggcatgctgtttcccctcgccaccagcggcgcgatggagccgttcccgttcctcgcaggcacggcaggcgcgctggtgggcggtttgcagaacatcggttccggcgcgctggcctggctttcggctatgatgccgcagaccgggcaggcgagtttaggcttgctgatgaccctgatggggctgctgattttgctgtgctggctgccgctggcgtcgcgtgtctcgcatcacgaacagccggtttaaccgcatgatggcccggcttctcgccgggcttttcacagacgggcgcaatcatcgcctgcaatagccgctctggggcaggccgccacgccccctcttccccgtcataaaactgaacatcggcgtttatcgcatacgggatgttggcctgttgcagctcgcacgccataaacgtggcaaacgccatctgcgaggcggttggcgtcaggcttttcgattcgcccaccccccagccgccaacccagctcacatgcccggttttttgttgccagtgcagcgcggcgttgattcggttacggatagccgctttctcagccgcagttccggacgtccacgggtatttaccgttcgttttcagcgggccccaggggaaaatatgccactccgccagcaggtaattctggctgtgcgcgggcagcttcaggctggataaatcctccggcgcggcgcgcagacgaggggcgataaaaatcatgcggctggcatcaatggcgtgaatgtctttgatcgctttctcatacacccggttgagcgaagcaacgttgtggttgagcttgtccgccggttcgtagatcaggtcaaagcccagcaacggcgagcgctgaccaaaatagtgagccacggcaatccaccagttaatcacctctttttcggtatccgctttcgggtcgtttttatattcatcggcctgataagcgatgatggggatgacgccgtattgctcgcaggcctccaccagcttacgcaggtgaatcagccgcgcttccgtcggttcgcccgccacccgaatacggacatggtgtatgcctttcgcctgaaaatcacggaccaccagcgggtcgaactcgcggataccgcgctcggtgcgtgcccagtcgacatccattccgacgcccagcatctgcgcgtaacgggcagccgtcagcggcggctcagcggcaatcgcccagccggaagagagtaagatcgcagtggcaataaaaggctttaacacggtttaccctggataaatcaaaagcattacctgtatttagcacgctttttcacatttggtgtagagcgaaagcgtaataattcttcaacccgccagctctcttagccagccgataaaggcgtcaattttcggccactgacggccgggaagcgttgagacgtaataatgctgatggcacttgagagttttcacatcaaagggtgcgatcaactcccctcgttcgagacgtttttgcaccagccgctttctccccatcgccacccccacattattcatggccgcgataatggctaaatcagagcgatcgaagccaatacccgatgacaacggcatattcgccgcgtaatgctgcgcccagctcagccactcatccgtaccggaatcattgctccaggcctgacggtcgtgcagtaacgtgcagtggctgaggttatgggggtttttcagcagttcatgctcccgggcatacgccggcgagcagacgggcaaaatctcttcatccatcaaaaagtgatgagaaaggtggtttggcggcgtatcgtcgaaatagagcgccagatcgatgccggttcgctgcatgttgacgtaatcattaccagtcagaatagtaagtgaaatcgacgggtagcggcgggtaaaatcccccagcatcggcaccagccagcactgggcgatcgacggccgggagtacaccgttagcgtacctgacagcgcctggtttttaatatccaggatctcctgattcagggtgtcgagggacgatttcagcgtccagtaaacgcgcttgccttcctgcgtcagctccactttacggtgtgagcggacaaacagctgaatgcccagctcctcttccagcaggttaatgcggtggctcaccgcgctggggctgagcgacagctccgccgccgccagcgcgaaggactcatgccgggcggccacttcaaaggtgtacattttcgaaagctgccagccgtttaacagccggtttctgccttcattcgcatcggtcatcacaattcccacacgtaatttctgcgttcagcataccgctcaagaatgaatttatgtgaacctaatacgagttaagtgcgctttttagaacacagtcactcagttgatccaatctggctcatctgaacgccaatttatatcgtttgtcagcccacgccgttttttcgtccaatacccccagatgacataagggtgaggtgagatatgggatctcaggtctgggttgtggcaacgctgcttgtcagcatcgtattgattgttttaaccatcgtaaaactgaagtttcacccgttcctcgcgctgctgctggcaagctttttcgtcggcgcgatgatggggatgagcccgctggatatggtgaacgccattgagagcgggattggcggtacgctgggcttcctggcggcggttatcggtcttggcactattctcggcaaaatgatggaagtctccggcgcggcagagcgcatcgggattacgttgcagcgctgccgctggctgtcggcggacgtgattatggtcctggtcggcctgatctgcggcattacgctgtttgtggaagtgggcgtggtactgctgatcccgctggcgttttccatcgccaaaaagaccaacgcgtcgctgctcaagctggccattccgctctgtaccgcactaatggcagtgcactgcgttgtgcctccgcatccggccgcgctgtttgtcaccaataaattaggggcggacgtcgggacggtgattgtctacggtctgatggtgggcctgatggcgtctctggttggcggcccgctgttcctgaagctgctcggcgatcgtctgccctataagccggttccggcggaattttcagacctgaaggtgcgggaagaacacacgctgccgtcgctgagcgccacgctgttcaccgtgctgctgccgattgccctgatgctggtgaaaaccattgccgagctgaacatggcaaaagaaggctcgctgtataccctgctggagtttatcggcaaccccatcaccgcgatgtttatcgccgtgtttgtcgcctactacctgctggggatccgccagcacatgggcatgggcgcaatgctgacccatacggagcacggctttggctctatcgccaacattttgctgattatcggcgcgggcggcgcgttcaacgccatccttaaaaccagcggtctggcggagacgctggcgcatattctctcgaacctgcatatgcaccctatccttctcgcctggctggtggcactggtgctgcacgccgccgtcggttcggcaacggtagcgatgatgggtgccacggcgatagtggcgccgatcctgccgctctacccgaacgtaagcccggagatcatcaccattgccatcgggtccggcgctattggctgcacgatcgtgaccgattctctcttctggctggtgaagcaatactgcggcgcgaacctgaacgagaccttcaaatactatacgacggcgacgtttatcgcctcggtgcttgcacttggcggcacattcctgctttctttcattatctgagcgcgaagagacgtattatggaaaacgcaactatcactactttaaccgcacagtttcctctggttgaggatctgattgccctgaaagaaaccacctggcttaacccgcgcaccacgacgctggcggaaggattgccgtatgtcgggctgaccaaagccgacgtggacgacgcgcacgcgcgcctgaaacgcttcgcgccgtatctggcgaaagcgttcccggaaacggcggcaacgggcgggattatcgaatccgacctggtcgcgatcccggcgatgcaggcgcggctggagaaagagtccggtaaggccattccaggcacgctgctgctgaaaaaagacagccatctgccgatttccggctcgattaaagcccgcggcggaatctatgaggtgctgacccacgcggaaaagctggcgctggaagccggactgctgagcgtcgaagacgactacagcatcctgctggagccgcgctttaaggatttcttcagccagtacagcatcgccgtgggctcaaccggcaacctcgggatgtccatcggcattatgagcgcccgcattggctttaaggtgacggtgcatatgtccgccgacgcccgcgagtggaagaaagccaaactgcgcagccacggcgtgatcgtcgtggaatatgagcaggattacggcgtggcggtggagcagggacgcaaagcggcggaaagcgatccgaactgcttcttcattgacgatgaaaactcccgtacgctgttcctgggctatgcggttgctggcgagcgcctgaaggcgcagtttgccgagcagggccgcgtggtggatgccgatcatcccctgtacgtctacctgccgtgcggcgtcggcggtggccccggcggcgtggcatttggcctgaagctggcctttggcgataacgtccactgcttcttcgcggagccaacgcactcaccatgtatgctgctgggcgtttataccgggctgcacgatgagattgcggtgcaggatctgggcattgataacgtgacggcggcggacggtctggcggtagggcgtgcgtccggcttcgtgggccgcgcgatggagcgcctgctcgacgggttctacaccctttccgaccagagcatgtacgacatgctcggctggctggctcaggaggaagggattcgcctcgagccgtcggcgctggcgggcatggccgggccgctgcgcgtgcaggcggatgccaaccccacgcacctggtctgggcgaccggcggcggcatggtgccggaggatgagatggcgaagtatttagctaaagggaagtaattatgccgggtggcggctgcgccttacccggcctacagttcgcggcagttgtaggcccggtaaggcgcagccgccaccgggcttataagctcataatttgctgaatgtgagtaactgcaaagagtaaagacagagatagcacagccaacgcaatcaggaacttatcccgcaccgctttcggctgcgcaaagtcgttctgcgccacgtccatcaggttacggctgcgggtgtagcgccataaaatgacggctaccagcgccagcacaacaatggagatccagaatggcgcccccgtgcggtgccagttgtgcttaatggcaagagcgatcagcgcgccataccccagcagcgtgcgcagccaggccagcgaggttcgctccggctgaagcccggagtccgcttcccgccgtgctttgcggctatccggcatacaacaccagtaacatcactacgcccgcaaccatcagcaaaatcgtactaatgatgagcaagccgcgcgtgtaggggagatcctgcttcagacgcatcgccttttcatttctaagccagcgcagatagccataaatcgccagcacaccggcaatcaggcacagcagcagggccagcacttcgcgaatcaacggggtggcaaaatcgggggcgagctgatcaagaccgacacctgcggccaaaaagcccagggcggtgcggatccacgctaagaacgtgcgttcgttagccagtgagaagcggtagtccggtgcttcaccgaggcgggaaatgttcatgaaggttccttgtcgtgctgcatgcaggcttcagcatagcgtaattcagccaggacaaggagaccggcatctggcgatgccggtcaggaaaattaatgcagttccggccagtactctttgttggcttcaatcagatcgtccagaatcgccttcgccaccgacgcgctcggtacggttttcgacagggtaatcgcctgccagagtttctgatacgagcgctgctcccaggcgtccaccaccagtttttccactgccacctgctggctcatgagccctttctggaagtgcggaatatcacccacggtcagcggctccggtccgttgtggccgaccagacacggaatttctaccatcgcgtcggcgtcaaaattatggatagccccattgttaggcacaatcagcagcatgcgttcctgggtattaaaggcgatcgcggtcgccagatcgacgatgtacgacgcatgttcgtcgatttccagttcaccggcagaagaatgaccggcttcgataatcgcccggcatgaactgaatacatgcttctcacggtgatccatcacttcattggcgcgggtacgctccgggttggaatgggcgaccacatagtccgggaacaggtaatacttcaggtaggtgttcggcatggtgtccggatccagcgcctgtacgtctttagccttggcgaaagtatcattccagctcgcttcagtatgcgcatcttccgaaggcggaacataaccgtttttcgccacgtattcgcgcagtttcggcatcagatcgttgccgttcagatcttcaatcgacgtccaccagccgaagtggttcagaccgtagtaacgcacgcgcatctctttgcgatctttcaggccgacgatttgcgccatacgtccttcaatgccgatcggcatgtcgcagatgttgagaattttcgcgttcggacgcaggcggcgcgtggcttccgcgacaatcgccgccgggttggagtagttcagcatccacgcgttcggggagtactgctccatgtaatccaccaactccagcacgccgccgatggagcgcatgccgtaggagatgccgcccggcccgcacgtttcctggcccagcacgccgtggcgcagcgggattttttcatctttttcacgcatggggtatttgcccacgcgaatatgcgccatcacgaaatccacatcggtaaaggccgcttcaggatcggtggtgtaactaaattcaatctccggcgcctgctccttaaggatgattttgcacgcctcggcgatgatctcctgacgtgctccgtcattgtcatagaacttcagcgcacgcagcgggaaacggtcacggttggctaacagcatcaggacgataccaggcgtgaatgtactgccgccgcctgcaataacaactgagaattttttcatgatatagcctctgtcagagtggtttgttcgtttgttaaaggggttttcatcagcgattccagctggtcgcgcacctgaggaacgtgcagaccgacaatcacctgtatgccgttgccgcgccgcaccacaccgtgtgcgcccagggctttgaagacgtcgtcgctttgggttttcgtcatatccaccagggcgatacgcaagcgggtggcgcagttattgatactttcgatatttgctgcgccgccgagcgcctgtaagaacccagcagcctgcccgacctgctggctggctgccgccggggcggtggtttgcccgcgcgcggccttatagtcggctttgttgtagagtttgatttcgctctcttcccggcccggcgttttgagattcagacgttcgataagcgttctgaagaccacgaaatagagagcggtgaagcagaggccgatgccaatctgggtgaataccgtcgaggcgtggttatggaacatcgggatccagttttgcggcaggaactggtccagcagaccgccccccatgttccccaccaccccgaaggtatacatcaccgtcgccatcgttgcggccagcacggcgtggatggcaaacagcaacggcgagataaacaggaaggtgaactccagcggttcggtaatgcccaccagcacggcggtaagcgtggccgggatcagcagacctgccactttgacgcggttctccggcgacgcggtataccagatagccagcgcaataccgactgagccaaacaccttagagttgccgtgcagcgcgaatccgccctccgggaacagcgttttcagcggcacagtgctctggctgaattcctgaaggtgctgtgcccagtagacctgaatgccgccttctaccgcagccgggccgaagataaacgggccgtagacaaagtggtgcaatccggttgggatcagaatgcgttccaggaaggtataaacccatacgcccagcgcgccagcggtacgtagaaaggcctgcaacgactcaatgcccatctgcactttcggccatcccagcagcgtcagccaggcgcaggggatcatgacgaagaacgcgaggataacgacaaacgaggtgccctggaaaatccccagaaagaccggcaacggcttgtcgaaaaatcggttgtggatggcggtgacgagcccggaaatgataatcgccccgatgatgctggtatcaagcgttttgattccggcaatcatcgccagcccgctgccggcagtgggttcagcagagaagtcgacgccaaagaagtgaccccaggtcatccccatcgcgttgataaagtagttccaggtcaggaagctaatcagcaccgccagacaggcgcggccctgcgcctgctttgccaggccaatcggtaagccgacagcaaaaatcagcggcatattacggaacaccgcccagccgccctcttcgatgatgtgaacaatttgcgcgaacagattatccggcgcggttaaggcctcaccgacaaacagcggattgcgaagcatgatggcgatcccaaccacgatcccggcaaagggaaacagcaaaaccggggtgaacatggcgccgccaaaacgttgtatttgactgagcatttttaaatcctcatgaaacaacctgtaggggatagaggcctttatggttttttactggcctgaggtgagcataagaacttactgatgcagcaacatggtatgccgctgcgattcgtgatcgcattcatggttttaatttgaccaatcaggtctactttttaaactaaacatagacaagttaagacgtaatccacgccatgatgtgtgcagagaggtctactggtgatctacaaatcaattgccgatcggctgcggctgcggctgaattcctcggactacaacattggtagtccgttacccggagaaaaagcgctggcaaaggagtttggcgtagcccggatgaccatccgcaaggcgctggatctgctggtaagctgggggctggttgaacgtcgacacggcagcgggacattcgtggcgcgcaaagacgttcatcatgaaacgactaatctgaccgggctggtggaggtgctgcgccagcaggggaaagaagtgcagagcaaggtgttgcagtttgaagcgatgcccgcgccgcccgccatcgccagccagctgcggattcaggttgatgagcggatctatttttcaaggcgggtgcgttacgtggacggcaaaccgctgatgctggaggacagctttatgccggtgaagctgttccgcaatctttccctggctcatctcgaagggtctaagtttgattacatcgagaaggaatgcgggatcaccatcagcggcaactacgagagcctgacgccggtgctggcagataaacagctggccggttatatgaatgtgccggaacagacgccgctgctgcgcatcacctccctttcctacagcgacagcggcgagttcctcaattattccgtgatgttccggaacaccagcgattaccaggtggactaccatttgcggcgcatccacccggaagacttgttagcccatcccccagaacagcaccgccagtagctgcggggtgatgatgcgcagaaacatcaccagcggataaaccgtggcgtaggacaacgccgccgcgccgctggtggcgtgcaggttgttggcgaacgccagcgcgggcggatcggtcatggaaccggccagcatgccgcacaacgtgagatagttcattttagcgaagatacgtgccagtaatccgaccgttatcagtgggatagcggtaataaatatgccgtatcctacccagcttatcccttcgccgttcaccagagtatcgacaaaatcgccgccggatttcagccccaccaccgccagaaacagcacgatgcccaactcccgcagcgccaggttagcgctcggcggcataaaccagtagagcttaccgatggagccgatacgcccgaggatcagcgccataatgagcggcccgcctgccagacccagcttcagtgctaccgggaagccgggcacgtacagggggatggagccaagcatgacgccaagcccgacgccgataaagaccggcagcatctgcacctgctggagtttttgctgggcgttgcccaccatgtccgctacggcatcaatggatgagggacgcccgacgaggttgagaatatcaccgaattgcaggctggcatcctggctggctaccagctcgacaccggcgcggttaagccgggagatcaccacgtcataacgctctttaacctgcaaatcgcgtattttcttgcccaaaaccttctcattggtcacgaccacgcgctccacgcgcatgtccgttccacgggttgagagtgaggtatccacctcctgaccgatcaccagccgggcattgtttaaatccgccggttgccctaccagatgcaggagatcgccgtgctgaataagggtatccggtgaaggcaccatcagcgtttcatcacgtttcaggcgggaacagataatggtcgcgctgttcagaatgggaacatcctgtatcgccatattgttcaggttggggttttcgacgcgaatgttgatggttttaatgagcgcatggccgttggtcagcgtgctttcatgctcttttgcctcctgctcgacgttaacgcggaacagcacgcgcaccagccacatcgagagcaaaataccgcaaatgccaaacggataggccatggcgtagctcatccccatctgatcgacgacatcagcagggatacccagatcgcgcagaatttgctggcccgccccgagcgcgggcgtattcgtgacggcgccggagaagatgcccagcacaacgggcagcggaatcgcgaagagtttatgcagaatggcggtaaccagcccacccatcacgacgatgccgaaggcaaagagattaaggcgtaaaccggagacgcgcagggaagcgaagaagcccggccccacctgaataccgatggtatacacaaagaggatcaggccgaactcctggatgaaatgcagcatatcggcgctgagcacccacccaagctggtcggcaaaatggccgacaaaaatcccgccgaacagcaccccgccgatgccaaatccgacgccgcggattttgatattccccagccatagccccactaccgcgacaagggccaacacgctaacggttaacgcgatatcactcatgatccacatcctgtgtataaccatagttatgctaaggattctctcagagctgacggcggttgtatgggcgatggcgcacaaaaaagccctgccggggcagggcttcatggcatctgtgagcgagtcgggtggcggctgcgccttacccgacctacaggatcggcaggtttgccacccggcaaaaacgtggtttagctgttcaacgccgggcgttcgctaatggcgatgcgctgaggcgcaatggcttccggcacgttacgggtgaggtcaatgttcagcagcccgttagtgaacgtcgcgccagaaacttccatatggtctgccagggtaaagctcaggctaaacggctgagtgacaagcccctgatgcagccatttggtctcggtgtctggtttttccggtgaccctttcacggtcaggcgcgtaccctcaagctggatgtcgagatcttcctggcggaacccggccagcgcaagcgtgatgcggtagtggttatcatcgcttttttcgatgttgtacggcggaaaggtctgctgttcggttgcgctttgcagtgcgttagccagtttgtcaaaacctatccactgacgcagcaggggggataaatcgtagttacgcatactaaatctccttctgagaagcgagtgcggcacagtttaattttgtgcacagttgtacctgcaaacccttgtggattcgcatatgctcccgttacggcaagcaagtccgggtgggccgctcacgcgacccgcgtaattagttgatttcgatacgacgcggttttttctcttccggaatcacacgttccagttcgataaacagcaggccgttcaccaggttcgcgcccttgacgtggatgttctcagccagctggaacttgcgctcaaagttgcgctctgcgatgccctggtagaggtaggttcgttctttctgctcgcccgcatgggagcctttcaccaccagcagattgtcctgcgcggtgatctccagttcgctctctgcgaaaccggcaacagcaatcgcaatgcgatagtggttttcgtcaaccagttcaacgttgtaaggaggatagccgttgctctggctctggttgttttctaagtggttgaacagacgatcgaaaccaatggcagaacggtatagcggagagagatcgaaattacgcatggataaatgctcctgaaatcagcgagaaaatgtagccttccaccatggacaggcttctgcttccccgaacacccatcaggcgtgtccgttatcgggttacattcttaaaatgggtctggatacggccttttcaagactgttgatgtgagatttttttgcactttgctggttgtcgcatagactcaggggcacagcacaaagggttaaattgcgatgacgaccacagtgcgggagttttgagctatccattttggacgcgcctcgctataaccctgagttgcaggtcaatgccgtgctactaaagatgactgagtgatgatgagaaatgttctgattaagctggcgtcgttcagcggggttgttttactttgcgggtgttcgagcgtgatgtcgcacaccggcggtaaagaaggaacatatccggggacgcgcgccagtgccgcaatgatctctgatgatgagacaaactggggtaccaaatctctggcgattcttgatatgccgtttacggcggttgccgatacgcttctgctgccgtgggatatgttccgcaccgacagctcagtgcgttcgcgcgttgagaaaagcgagcaggaaaagctggcgaccaattccgtcatcccgcccgcagagatgcctccacgctaattctgtgcggtttccgttagccacagctggcggaaaccgtccttctcttccatccatgcaataaatcgtccgtccggggaaaacaccacagcgtcagcagacggcggattgccgtgatcggacgtcaaaaacgtcacctctccggtctgcgcatcgcagcaggcaatacggcctgcaagcacaaatcccagcccgttgccggaaggatgccagttaaaggccgactgaatatcacgctcagtgtgggtcagctgacgcggctcgccgccctcaggggagataagccacagctgcacaacgccgttatcgtcccgcattaaaaacgcaatctgcgtcccctgcggattgctgcgcacccagtggcgcggcacgttcaccagccccggatacgccttctgatgggtgaaggttaagcgacgttgcgttacgcccgcaggcggcgcgggcattgtatcaggcgttccctgcaacggcgcatcgcccgcccgtttccagccctgctcgtctttggggaggtccacaataaacagttcgggcactttctcgcctttcgcagacaccgtatcgccgataaacgccagcctgtcgttgcccacccagccctcttcataggcgcggtttacctcatcgctgcccggtttcgggttcggcgttgtccggcttaccagtacgctccagaaggtgccggcatattcccgcggatggttcccctgtgggtttactgggccaaaaggcgccgccaccccgacgttacgcaagtccagctgcggatcgcgcgcgtgcagcacatggtcgttgtaggtaaagctgacgaactgcccgttcgggctaaaaacgtggacgtggctgccgccacgcagcgcgcctgcggtgtaaggcgcggtgatatccatcgcatcaagattgctcacctgaccattgtgcgcaatcaccccctgacgatggtgaaaatcatactgccagtctgcatccgggtttttcgggccgtggataaaaacatatttgtcctgcgccggatgaacggttaccacgccgacatgcgcgccgtcagtcgcacggtagatcgcctcaacctcgcccgtactaacattgacccgctcaatggtttcaccggtaaacgacgcgccggacgggcggacatcatagacaagccactggctgtctggcgtccaggtgttgatgttggtgagctggtggttgcgggaagcgaaggtgatttgtttcatgaaaataccctgatgcgcggttatcgcatcagggtaaaacatccgaagggattagcctactcgtttaacgtcgccgaccagcaggatgtaggagagcgccccgatcagcgccacggcagagatatacaccagagccggaccaaagccgtagtcctgcgccaggtaaccgatgaccagcggtacggtgatcccgcccaggccgccaacgaagttaaacacgccaccagtcaggccgatcagacgcatcggcgccagggacgacaccagcgaccaggtgatggaggcaaaaccgtttccgaagaacgctaccgccatcagggtcatgatccacaccggatcgttggtgtagttcgctcccatgatgcaggtagagatcagcagtccgcagataatcggcgttttacgcgcaacgcccagcgagaagccttttttcaccagcttatccgccagccagcccgagagcaggacgccgaaaaacgccgcaaggaagggtacggtggtcataaagcctgccttcagcgcggtaatacctttttcctgggtcagatagttcgggaaccaggtgaggaagaaccacagcgtggaggtcaccgcgaactgtcccagatacacgcccaccagcttacggtggaagaccagcttccagtccgctctggtcagcggctggcgcgcctcttttttcacgggcgcatcgccatccaccaggccaccgccgtcgcggatgtagtccagttcggctttggtgatgcttttggtcaggcgcggcggctgataaaccttaaaccagatgagcgaccagataatgccgatcccgccggtgacgataaacacccagtgccagctcagcagctcctggatccagattaacagcggcgtcagaaacgccagaccaacaaactgcccggaggtgtaaaaaccaacagcggaagcgcgttcgtgttcagggaaccagctggtcaccatgcggttgttggtcggaaacgcgggcgcttcaaacaccccggtgatggcgcgcaggccaatcagcgacatcagcccggtcgcgaagccctggaacagggtcgccacggaccagccgaaaatggcgataaagtaggtcagacgtgaccccacgcggtcaaggaaccagccaccggggatctgacagagcgtatacagccaggcaaacgccgagaagacgtagcccatttccgctttggtgatgccaaactcttcctgaatatgggccgatgccacggcaaggttggcgcggtcgacataacagatgaccacggtaataaagatcatgatcagcgtcaggtaacgacgacgcccggtttttgcagcagtaactggaatatccatcgcaatctgtctccagattttgggcatagcgaagccgctcaccatgccctgtaatttacagagggttatattttttctatgtacgtttttttttgcccggtggcgcttcgcttaccgggcctacgagagagtaggccggataagcgtagcgccatccggcgatttaccactcggctacggaaccgtcttcatgacgccacagtgggttacgccagtccggcgcacttttactcagctcaatgactttggcttcatcgatctccacgccaaggcccggcttcgttaacggtttaaagaaaccaccttccatgctgaagtcttttttgtttttcacaaagtcgagcagctccgcgcccttgttatagtgaatgcccatgctttgttcctggaacaccgcattgcgggagacgaagtcgacgtgcaggcaggccgccagcgcaatcggcccaagcggacagtgcggcgccagcgccacatcgtaggcttctgccattccggcaattttgtagcattcggtgatgccgcccgcgtgggagaggtccggttgcaggatcgcaatgccgcccgcttccagcacgcgtttaaactcgaagcgcgagaacatgcgttcccccgccgcgatgggaatgtgcgtctgttcagccagtttcggatagtattccgcctgctcggccagcaccggctcttcgataaacagcgggcgatacggctccagctctttaatcagcactttggccattggcgcgctgacgcggccgtggaaatccagaccaaactcaatctcgttgccgaaggcttcacggatttgcgccacagtgttcaccgcccggtctaccgcgcgcgagttgtcgataacgcccatctcttcgcagccgttgagtttgaaggtgtcaaaaccgatgttgcgcagttgccggataccgtcgatcacttccgcagggcggtcacctcccacccagctgtaggctttgattttgtcgcgcaccaggccgcccattaattgccagaccggggcattcagcactttgcctttgatatcccacagcgcctgatcaataccggcgatggcgctcatcaggatcggaccgccacggtaaaatcccgcccggtacatcacctgccacaggtcgttgatgcgcgccggatcctgaccaatcaggtactcgcccagctcatgcaccgcggcttcaacggtgcgcgcacggccttcaatcaccggctcgccccagccaaccacgccttcgtcggtttcgattttcaggaacatccaacgcgggggtaaacggtacgtggtgagtttggttattttcattgcactgcctctcgatacgctttcacaaatgctgccgcctgctgtgcggtacgctcaacgggctgaccggcacgatagagatcgctgcccagccccgcgcccacacagcccgcgctcatccactggcccaggttttccggcgtgacgccgcccacggcaaagaccggcacgctggcgggtaagaccgctttcagcgctttgatgtaatccggaccaaaggccgacgacgggaaaattttgagagactgtgcgcccgcatcgagggcgnnnnnnnnnnnnnnnnnnnnnnnnnnnnnnnnnnnnnnnnnnnnnnnnnnnnnnnnnnnnnnnnnnnnnnnnnnnnnnnnnnnnnnnnnnnnnnnnnnnnnnnnnnnnnnnnnnnnnnnnnnnnnnnnnnnnnnnnnnnnnnnnnnnnnnnnnnnnnnnnnnnnnnnnnnnnnnnnnnnnnnnnnnnnnnnnnnnnnnnnnnnnnnnnnnnnnnnnnnnnnnnnnnnnnnnnnnnnnnnnnnnnnnnnnnnnnnnnnnnnnnnnnngtggccgtggcgcaaccgggcagacggtcatgccgtaatccaccgcccggcggatcacctcggggttgatatttggtgtgacgataagcttgcagcccattttcgccagttcatctacctgctccggctgtaatacggtgccagcgccaatcagcgccttatcaccaaacgctttcacaattgccggaatgcttttttcccactccggggagttgagcgggatttccaccgcgtcgaacccggcgtcgatcaccgcgccaacgtgcgctaaggcctcaccgggcgtgataccgcgcaaaatcgcgatcaggggaagttcagtttgccactgcatgagcgatgctccttatgcctgcctgaaatgccgtgtcgccttccaccgcagcaacatcccgtccgatagcgtggaacgcctggcggtaacgagacgtcagcgatgaacccgcgacgagcgtgatggcctgctgcccggcgaacgcgtcgctcagagtggcgacttctgcgccaatcagcaggccggacagaaattcgctgacctgttcgcgcggaagatttcccagcacgtgcgaggcgcgaacctcaaaaagttgcggcaaaacggcaggggatgcgatcccgcgctcaagcccggcggcaaacgcttccggcgaaggggtctgctccggcaaaccggcccccaccagcgaatgcttaagcagcaagtggtgcagttcgccggtcatcacggtgcggaaatcatgaatttgctcagcatccgcctggacccatttgcaatgcgtcccgggcatgacgtagacagaagaaggagaaagggtgcgcgccccgagcagctgcgtctcttcgccgcgcatcacattatggttatcgtcgcgagagacgcataaaccgggaataatccagacattgtcgccaacggacgttaactgctcgccaacggcggtgaaatgcaccggaactgacaggtaaggcgcgaccttccaccccacgttactgccgaccattccggccatcaccactggcgtagtaccgtcgcgccagttttgtgtcacctctgctaacaccgctgcgggggatttaccgttcaggcgcgtcacacctgcttctgattgcctgctttccaggcactgctcaccctggtagagccaggcgcgcagattggtcgatccccagtcaattgcgatgtagcgtgatgtcatgtgatttccttcaaccttcgtgtcgagctggcgatcatagtgagcgccgcctgctctgccgcatcgccgtcctgatgccgtatcgcatcgaacagcgctttatgttcctggagcgttttcggcatgttggcctcatcgcccatccaggtacgttcaaatactgctcgctgtagcgagctgatcgccacgctaagctgctgtaaaaccgggttatgcaccgactgcaataccgcttcgtggtagcgaatgtccgcttcgttgaacgcctcccgattctggttattggcgatcatgtcgtttaaagccgactcaatctgtgccaggtcacctgacgttgcgcgctctgccgcccagcgggcgatggccggttccaccagatttcggacttcgctcatcgcgccgatgagccgtgggtcgtagtcgttttccagcacccattgcagaacgtctgtatcgaggtagttccactggttacgcggcgccacaaacgcgccgcgatagcgcttcatttcaatcagccgcttcgccatcagcgagcggaacacttcccggatgatgttgcgcgaggtttcaaactcctcgcacagttccgcctctgctggcagcggcgaaccgggaacgtatttgccacccacaatctgagtgcccagcgtgatgacaatgcgatcggttttattgagtgtcatggagagtccttgtgctctgtaagtccatcactactttaccgcgaccgctgaatttcgcctcacttttgcagtacaaacgtgaggcctttcgcctttgttgtggtgataatgtagtacaatcatataatgttgtactacaatccagatcacaaaaagaacaattcgataaattcagggccaaaaaaagccccggttaataaccggggctaatctttcaaaacacttgttacgacagaacgaatttttcgatcgcccaggcaacgccgtcttccaggttagatttggtcacgaagttcgccacttcttttaccgacgggatcgcgttatccatcgccacgcccatgcccgcatattcgatcatcgcaatatcgttttcctggtcgcccagcgccatgatctcctcaggcttgatgcccagcgcatcggcaagcgatttgacgcccgtgcctttattgacgcgtttatcaaggatttcgaggaagtacggcgcacttttcagcacggtgtatttctcttttacctcagccggaatgcgtgagatggctttgtcgagaaccgcaggttcatcaatcatcatcactttcaggaactgggtcgccgggtccattttctccgcttcgcagaacaccagtggaatggttgcaacgtaggactcgtgcaccgtgtagtagctgatatcgcggttggcggtgtaaagcgtattgcgatcgagcgcgtggaagtgagagcccacgtcgcgggagagtttttccaggaaacggtagtcatcatagctcagtgcagtttgcgccaccgcgctgccatcggctgccttttgcaccagcgcgccgttataggtgatgcagtaatcgccaggctggttcatgtgcagctctttcaggtaactgtgcaccccggcatacgggcgtccggtggtgagcaccacgttcacgcctttttcgcgtgcggcggcgatcgcatttttaacggcaggagagatagtgtggtctggcagcagcagcgtgccgtccatatcgattgcaatgagtttgatagccatgaggtccccgggataaatgagtgctacctcatgctaacgcgattaagcacacaaaaatagagctaccttgcgcaacaaaaagccccttttacgtttatcccgggaacgggaactcactcgcgggtgagaacgattttgccaaacgcaccgcgatccagatgttcaagcgcctgttccagctcgtcaaagcggtagcgatgctcaatcaccggttttaactccgtgacatcaacagcacggacaaaatcttccagcgcccggcggtgtccaaccccaatcccctgaatgacgggagatttcagcaacagctcgcttgcaggcagagaaatttctgtcccggccagcacgccaatgaccgatatccgcccatgaacggcaacggcgcgcagggaatgtctcaggttctccccgcccaccgtttcgataatatggtcgatgccgcgatcctgcgtcagtgccagcgtattttcagcccagtcgcctttcagtcggttgatgccctggctggcccccagttttttggcctgcgccagtttttcattgcttcccgaagtgacaaacacctctgcgccgtgcgcttttgcgatttgcaaagcaaagagcgccacgccgcccgtgccctgtaccagcaccgattgcccggcgcgtaaatgaccgcgctccaccagcgcgaaccatgcggtaagccccgcgcaaggaagcgtgctggcctcagcgtcatccaggctttccggggaggccaccagcgcgtcttccttcacaatcacatactcggccagcatgccctggaagtatccgccggacgttttatagggcaaattgcgcgcgtccgcctgcggcttaccgtcgatccactcagggaagaaggttgaaatgacgcgtgcgccgggtttgaagcgcgtaacgccttcaccaatgcgatccaccacgcccgccatatcagacgccggggtaaacgggaaggaaagcggaatcggcatcgtgccttcaatcaccattttatcccggtagttgagcgcaacggcattaacccttacgcgaacctcccccgggcctggctgtggaacaggctcctgaacgagcctgaggctttcacgaccaagggcatccattgaccagcgttgcattgtttcagtcattttttttctcctgtcatcagatgattttcagttctgacagtctaccgttgactcagcgtcgccagtggcgataagttttctcttcattgacgccacaatcgatacaatccatgaccgatacgctgaaagatattcccgttttcgttgcctccgttgaggcaggaagttttgcccaggccgccgtccgtctgcatttgtcgcgctcggcggtaggaaaaagcattgctcgtcttgaagagaggctgggggttcgtctgtttcatcgaaccacccgcagtcagaggctgaccgataacggcgcgcttttttatgaacgctgcctgcgcgcgctggaggagatccgcggtgcggaatcgctgcttgaaacaggaaagcagcaggtcactggccgcctgcgcgttgccatgccggtgctgtttggccgccagtgcgtcgccccgctgctgattgaactggcgcaggaacaccccgggcttgagcttgaaatgtcattcagcgaccgcgtggtggatctggtggaggaagggtttgatatggcggtgcgtaacggcacgcttcaggacagcagcgttctggtcgccagaaagctgggggaacaccgcatggtgctgtgtgccgcgccggattatctgcttaagaatggccagccgcaaaccgttgatgatttacgccagcatacggccattaactacacgcgtgcgggcagagtcctaccctggcagctgatggattacgatggcacgtcgcgcacgtttattccccgctcatcgctcaatatggatgatttacaggcgatctgcgacgcggcgctggccggccacggccttgcgtggctaccctgctggatggtcattaaagaaattcagcagggagatcttgtcccgctcttaaagcaggccccggatgtacgcttcgacgttcatgccgtctggcagcagacgccacacctgccgctaagggtaagaattgccatagatatgctggtcaaacgtttaccggcagtgatgtcgctggagtttcctgcgtccataaaaaagccgcgctaaagcgcggccagttatgctgtcgtaaagcgacgattaaatatcgatattcgccgccttcagggcgttctcttcgatgaaggcgcgacgtggttcaaccgcatcgcccatcagggtcgtgaacagctgatccgctgcgattgcgtctttaacggtgacgcgcaacatgcgacggctttccggatccatggtggtttcccacagctgatccgggttcatttcgcccaggcctttataacgctgaatagagagaccacgacgggactcttttaccagccactccagcgcctgttcgaagctggctaccggctgacgacgttcgccacgttcgataaacgcatcgtcttcgatcagaccgcgcagcttctcgccgagggtgcagatacggcggtattccggaccggtcacaaattcgtgctccagcgggtagtcggtatcgacgccgtgggtacgcacgcggacgatcggctcgaactgctgctcagcgttctgctggacgtcgaacttccactggctgccatgctgctctttctcgttcagctcgctcaccagggtgttcacccagcgggtgacggtctgctcgttgctcagatcggcttcggtcagggtcggctggtaaatcagctctttcagcagcgctttcggatagcgacgctccatacggccaatcattttctgcgtggcgttgaactcggagaccagacgctccagcggctcaccggccagcgctggcgcgctggagtttgcgtgcagggtcgcaccatcaagggcgatcgcgatttggtactgatccatcgcgtcgtcatctttaatgtactgttcctgcttgcctttcttcactttgtacagcggcggctgggcaatgtagacgtggccgcgctcaacgatttccggcatctgacgatagaagaaggtcaacagcagcgtacgaatgtgcgagccgtcgacgtccgcatcggtcatgatgatgatgctgtgatagcgcagtttgtccgggttgtactcgtcgcgaccaataccgcagccgagcgcggtgatgagcgtcgccacttcctgagaagagagcatcttgtcgaagcgcgctttctcaacgttaaggattttacccttcagcggcagaatcgcctggttcttgcggttacggccctgcttcgcagaaccgcccgcggagtccccttccacaaggtacagttcagacagcgccgggtcgcgttcctgacagtcagccagtttgcccggcaggcctgccaggtccagcgcgcctttacgacgggtcatttcacgcgctttacgcgccgcttcacgggcacgcgccgcatcgataattttacccaccacgattttcgcgtcggacgggttttccagcaggtattcgctcagcagttcgttcatctgctgttcaaccgccgatttcacctcagaagagaccagcttgtctttggtctgtgaggagaacttcggatccggcaccttcacggagaccacggcaatcaggccttcacgggcatcgtcaccggtggcgctgactttcgcttttttgctgtagccttctttgtccatgtaggcgttcagggttcgggtcatcgccgcgcggaagcccgccaggtgcgtaccgccatcgcgttgtggaatgttgttggtgaagcagtagatgttttcctggaaaccgtcgttccactgcaaggccacttccacgccgataccgtctttttcagtagagaagtagaagatattcgggtgaattggcgttttgttcttgttcagatactcaacgaacgccttgataccaccttcgtaatggaagtggtcttctttgttgtcgcgtttgtcgcgcagacgaatcgacacgccggagttcaggaacgacagttcacgcaggcgtttcgccagaatgtcgtactcgaattcggtgacgttggtgaaggtttcgaggctcggccagaaacgcaccatggtaccggttttatcggtatcacccgtgacggccagcggagcgtcaggcacgccgtgctggtagatctgacggtgaattttgccttcgcgctggataaccagctccagcttctgcgacagggcatttactacggatacgcctacgccgtgcagaccgccggaaactttataggagttatcatcgaacttaccgcctgcgtgcagaacggtcatgatgacttccgcagcagatacgccctcttccgggtgaataccggttgggataccacgaccgtcatcggtaacggacacggagttgtccgcatggatcgtgaccacgatgtctttacagtgacccgcgagcgcttcgtcgatagcgttatctaccacctcgaataccatgtggtgcagaccggtgccgtcatccgtgtcgccgatatacatacccgggcgcttacgcaccgcatccagccctttcaggactttgatactggaggagtcataagaattcgacatcaacgtttctcgctcatttcaacttgggttaatccgttattttacccttttccacggtaaacatcttcgaattttcgtccgacatgtctataacgtgttcagcgctaatggcgctgacgaaaacctgcgactgcgtggcttttaagcggctggcaagcaacccgcgccgcgcgtcgtcaagttccgaggcaaaatcatctatcaggtacaggcagcgtcgcccgctctctcgagtgaggaactccccctgcgccaggcgcagcgcgcacatcaggagcttcagctgcccgcgcgacagcgtgtcttccaccggcgcaccgtcggcacgaatgcggaaatccgccttgtgcgggccgtgcgcggtgtaggtcaacatgcgatcgcgctcgaagcttctctctaacacctcggcataatccgtctctttttcccagccacgctggaaagagaaggtgagagagaactcgggtaaaaactgtttgcaggtgtcggccatgtcttcggcgatacctgcgctgtattcggcacgccagcggctgatttgttccgcaagagggatgagttccatgtcccacggacgcagctgagcgtagcgcgtgacctggcgcaatgcggcgttacgctgtttaagcagacgcttcaggttgctccaggcgttaaagaaaccggcttcattgtgaaagcatccccagtcgaggaacgctcttctgtatttggggccgccgttgagtaaagtaaacccctcgggcgtaatcagctgcatcggcatcagcagcgccagctccgccaccttgtggccatcggtgccgtcgatgcgcaccttgctgtcgccctgcttgtctttggtcaggccgatggcggtttcccgctctgcgccctgcaaacgcccgtgcagaacaaaagattcctgctcgtggcgaatcacgcgaccaatctgcaaactgcgaaacgcccggccgtggccgagcgtatagatggcttccagcacgctggttttgccgctgccgttcgcgccaaccaggaagttaaagccaggggataaagcgagatccgcgctttcgatattgcgaaagtcgcggatcaacagacgggtgagcgacattacagtctcattggcatgacaacataagcagccgactgcgatgcggcatcttcaatctgtacgctcgaaacggagtcagtcagcaggatgcgaacgttctcgcatttcagtgcattcagcacatccagcacatagctgacgttgaagccgatttccatctcagccccggcgtaggtgacgtccagaatctcttctgcctcttcctgctccgggttgttggcggtgattttgatctggttttcactcacgtacagacgtacgccgcggaatttctcgttggagagaatagcggcacgcgcgaacgcctgcttgaggatgtcgcaacccgcctccagcgttttatccgggttcttcggcaatacgcggcgataatccgggaaacgaccgtctaccagcttcgatgtgaagacaaaatcgcccacgtgggcacgaatattgttgctgccaatctgcacgcgcagcggcgtttcaccgccgtcgagcatacgcatcagttcaattacgcctttacgcggtacgatcaccgaatggtttggcagtgaatcgccaatcggcatggaacaaaccgccagacggtgaccgtcggtcgccacggtacgcagctcttcaccttcggtttcgaacagcatgccgtttaagtagtaacgaacgtcctgatgcgccatggagaactgcgtggcttcaatcagacgcttcatcgtcgcctgtggcagggtgaattcaacttcgctctgccagtcgtccaggttcgggaagtccgcagcgggcagcgtggagagggagaaacggctgcggccagagcgcaccagcatgcggtcgccctccagctgcacggcgatttcagcgccttccggcagcccacggcaaatatcaaagaatttacgtgccggaaccgtggtcgcgcccgcgtcgtgcggctgagtcagcgtaacgcgcgcgatcatttccatttccagatctgtgccggtcagcgacagcgtaccgtccgcgacctgaagcagcaggtttccaagaataggcagcgtagggcggccgcctaatgggccactcacctgttgcagcggttttaataaatgttcacgttcaacggtaaatttcatagcgtcacgatgataatgttctgattaaattggaaaaatcttcttttatgtcgtggctttcttcgcgtaactgctcgatcttgcgacaggcgtgcagcacggtcgtatggtcacggccaccaaacgcatcaccgatttccggcaggctgtggttggttagctcttttgccagcgccatcgccatctgacgcggacgcgccaccgagcgggaacgacgtttagacagtaaatctgccactttgatcttgtagtactcagccaccgtcttctgaatattgtcgatagtgaccagtttttcctgcaaagccaataaatcgcgcagcgcttcacgcacaaaatcgatggtgatcgcccgaccggtgaagttggcgttggcgataacgcggttcagcgccccttccagctcacgcacgttggaacgcaggcgcttggcaatgaagaacgccacttcacccggcaggcgaatgtcgttctcgtcggcttttttcatcaggatcgcgacgcgggtttccagctccggcggctcgatcgccacggtcaggccccagccgaagcgggatttgagacgatcttcaacgccgttgatctcttttggataacgatccgaggtcagaatgatctgctgattgccttccagcagggcgttaaaggtatggaaaaactcttcctgcgatcgttctttattggcaaagaactgaatgtcatcgatcagcagcgcatcaacggaacggtagtagcgtttaaactcttcgatcgcattgttttgcagggcttttaccatgtcctgaacgaagcgttcggagtgcatatacaccactttggcattgggcttacgcgccataatgccgttgcccaccgcatgcagcaggtgcgttttaccgagacccgtgccgccatacaggaacagcgggttgtaagcgccaccggggttatcggcaacctgacgagccgccgcgcgtgccagctggttcgacttaccttcaacgaagttatcgaacgtgtgtttcacgttaacgttagagcggtaggtaggctcagcgggggccggaacgttatcccagccctgacgagccggtgcaacgcgaggcgctggcgcgggcgccgcctgtgcaggggctgccacattgacaacttcacgaacggtttgggtgaccggctttgtgcccacttcaaaacgcagctgtggggcatctgacccgcagaaatcgttcagcagtccattgatgttattaaggtatttatcccttacccaatcgagcacgaaacggtttggcgcatacaaagccagcgtgttatcgctcagttccgcctgcaacgggcggatccacatactgaattctgtggctggtaactcatcctgcaatcgggcaagacactgctgccaaagcgaaagtgacacggcggactccactcgaacaataaaagaaaactattgaatattcatgattgttggcgcacatcgacatgaccccatcagggtgatgtgcgaaccgctatctgcggttatacacgctatcgttgatacaacctgaacgatgttgtgtttatgcccgaccaggatcgctggatcccgatcgggaccgcggatcatagcctaaactgagccagagatcttctgtttctcacagattcttcccgatttatccacaggaagatccggaatcgggtaagtgtaaacgatcctgacgcgagtgcctcgcgatttaggccgcatattggaaaatttaatgagcacagacaatttttggcttaaatgatctaacgaagatccgggacgatccttgcgctttatcgttgagcccgtataatcctcgacccggcgcgtgatgctcatcttcctgcgtcgtccgctgctcattttccacgcgaaaacgtgcggaaatacacagggatttaaggaaagagaattgactccggagtgtacaattattacaatccggcctctttaatcacccacggcttcggcgtccgtcattcgaaactcggtcgggcatccgcaaaagtcatgaattttttcaagtttaggtagaaatcgccatgaaacgcacttttcaaccgtctgtactgaagcgcaaccgttctcacggcttccgtgctcgtatggctactaaaaatggtcgtcaggttctggcacgtcgtcgtgctaaaggccgcgctcgtctgaccgtttccaagtaataaagctaacccctgagtggttaagctcgcatttcccagggagttacgtttgttaactcccactcatttcactttcgtcttccagcagccattacgggctggcacgccgcaaatcaccatcctcggccgccaaaattcgctggggcatccccgcatcggtctcacagtcgccaagaaaaacgttaagcgtgcgcatgaacgcaaccggattaaacgtctgacgcgtgaaagcttccgtttacgtcagcacgaactgccttcaatggatttcgtggtggtggctaaaaaaggggttgccgacctcgataaccgtgctctctcggaagcgttggaaaaattatggcgccgccactgtcgcctggctcgcgggtcctgatagccctcattcgggtctatcaacgcctgattagtccgctactcgggccacactgccgtttcacgccaacatgctcaagctacggaattgaggcattgcgcaggtttggagtgataaaaggcagttggttgacggtgaaacgcgtattaaaatgccaccctttacacccaggtggagacgaccccgtccctccaggaccttttgataccagagaacactaacgatggattcgcaacgcaatcttcttatcatcgctttgttgttcgtgtctttcatgatctggcaggcatgggagcaggataaaaatcctcaaccccagcagcagaccacgcagaccacgaccaccgcagcgggtagcgccgccgaccagggcgtaccggccagtggccaggggaaacagattacggttaagaccgatgtgcttgagctgactatcaacacccgtggtggtgatgttgagcaggcgctgctgttgacctacccgaaagagctgaagtctaccgaaccgttccagttactggaaaccacgcctgaatttatctaccaggcgcagagcggcctgaccggtcgtgatggcccggataacccggctaacggtgcgcgtccactgtataacgtcgagaatgacacgtttgtgctggctgatggtcagaacgaactggttatcccgatgacctacaccgacgcggcaggcaacaccttcaccaaaaccttcaccctgaaacgcggtgagtatgcggtgaacgtgggctacagcgtacagaacgccggtgcgaaaccgctggaaatctctacctttggtcagctgaagcagtccatcaatctgccgtctcaccgtgataccggaagcagcaactttgcgctgcataccttccgtggcgcggcttactccacgccagataccaagtacgagaaatacaaattcgataccattgccgataacgaaaacctgaacgtcagctctaaaggcggttgggtcgcaatgctgcaacagtatttcgcgacggcgtgggtaccgaataacgacggtacgaacaacttctacaccgcgaacctcggcaacggtattgcagccatcggctacaaatctcagccagttctggtgcagccgggtcaaaccggtaagctggcaagcaccctgtgggtcggcccggaaatccaggacaaaatggctgccgttgcgccgcacctggatctgaccgtcgattacggttggttgtggttcatctctcagccgctgtttaagctgctgaagttcatccacagcttcctgggtaactggggcttctccatcatcgttatcacctttatcgttcgtggcatcatgtacccgctgactaaagcgcagtacacctccatggcgaagatgcgtatgctacagccgaagattcaggctatgcgtgagcgtctgggcgatgacaaacagcgtcagagccaggagatgatggccctgtataaagcagagaaagtgaacccactgggtggttgcttcccgctgctgattcagatgccaatcttccttgcgctgtactacatgctgatgggttccgttgagctgcgccacgcgccgttcgctctgtggatccatgacctgtccgcacaggacccgtactacatcctgccgatcctgatgggcgtgacgatgttcttcattcagaagatgtctccgaccaccgtgaccgacccgatgcagcagaagatcatgacctttatgccggtcatcttcaccgtgttcttcctgtggttcccgtcaggtctggtgctgtactatatcgtcagcaacctggtgaccatcatccagcagcagctgatttaccgtggtctggaaaaacgtggcctgcatagccgcgaaaagaaaaagtcctgattcggtaacttaacgctaaaataagggcggtcgattgaccgccttttttatttgtattgaacgagagcaaccatgagccataacgacactatcgtcgcccaggcaaccccaccgggacgcggtggtgtaggcattctgcgcatctccggcctgaaggcgcgtgaggtggccgaagcggtgctgggtaaactgccaaagccgcgctacgctgattatctgccgtttaaggatgccgacggcacaccgctggaccagggcatcgcgctgtggttccccggcccaaactcctttaccggcgaagatgtgctggagcttcagggtcacggcggcccggtgatcctcgacctgctgttaaaacgtattctgaccctgcctggcctgcgcattgcaaagccgggtgagttctccgagcgtgctttcctcaacgataagctcgacctggcgcaggccgaggcgattgctgatctgatcgacgccagttccgaacaggcagcccgctccgcgctgaactcgttgcagggggcattttccgcacgcgtgaatcaccttgtggaagcacttactcacctgcgaatctatgtcgaagcggctatcgacttcccggacgaggagatcgacttcctctcagacggtaaaattgaagctcagctcaatcaggtgatgaacgatctcgatgccgttcgcgccgaagcgcgccagggcagcctgctacgtgaaggaatgaaggtggtgattgctggtcgccccaatgccggaaaatcgagcctgctgaacgccctggcgggccgtgaagcggcgatcgtgaccgacatagccggcaccacccgcgatgtcctgcgcgagcatatccatatcgacggcatgccgctgcacatcatcgacaccgctggcctgcgcgatgcgagcgatgaagtcgagcgtatcggtatcgaacgcgcctggcaggagatcgagcaggccgaccgcgtgctgtttatggtggacggcaccacaaccgacgccgttgacccggctgaaatctggccagactttatcgcccgtctcccggctaaactgccgatcaccgtggtccgcaacaaggccgacgttaccggcgaaacgctgggcatcagcgatgtgaatggtcactcacttattcgcctgtcggcccgtaccggtgaaggcgtggaagccctgcgtagccatctcaaacagagcatgggcttcgacaccagtatggagggcggcttcctggcacgtcgtcgtcacttgcaggcgctggaagaggcggctcgccaccttgagcagggtaaagcccagctgatcggcgcgtgggccggtgaactgctggcggaagagctgcgtctggcgcagcagaacctgagcgagatcaccggggagtttacgtcggacgatttgctgggacggattttctcgagcttctgcattggtaagtaattcccattaatacagggtgatttcctccagggaaatcaccattgtccaaatggcaactcgcttaatccctccacgccccctatcctgcttgcctgcatctatgggggatttatggctcgttttctgttctgtagttttgcgctggttctgctgtatccgtccggcattgatatgtatctggtggggctaccgcatattgcccgcgatctgggcgccagcgaggcgcagctgcacatcgcgttttcggcctacctcgcgggaatggcgtcgtcgatggtatttgccgggaaaatcgcggataaagcaggccgtcagcccgtcgccattacgggtgcagttatctttgcgctggcatcagtactgtcttcagtagctcaggaaagcacaatgttcctgtcaggccgttttatccagggcattggcgcgggtggctgttacgtggtggcgtttgctattcttcgcgataccttaagcgcccagcgccgcgctaaagtgctgtcgatgctgaacggcattacctgcatcatcccggtgctggcaccggttgtaggctacctgattatgcttaaatttccgtggcagagtcttttctggaccatggccgcaatgggcgccatcgtctttatcctgtccgtgacggtgctgaaagagacccatcccggttcgcaacagccatatcacaccgcaaccctccatccggctgaaaagctgatgaatcgctttttcctgagtcggctgacaatcaccacgcttagcgtggcggtgatcctcacctatgtaaacgtttccccggtgttgctgatggagacgatgggcttcgatcgcggtgagtattcgacggtgatggcgctaaccgcgatggtgagcatggcggtttcattctccacgccctttgcgctcaacatcttccgccagcgcacgctgatgctcacctcacagacgctgttcctcgccgcaggcgtgatcctggcgaccgccacctcacacgctgtaatgctggtgggcattactctgatctgcgccggattctccgtcggctttggtgtggcgatgagtcaggcacttggcccgttttcattgcgggcaggcgtggcaagctcggtgctgggcattgcgcaggtctgcggttcgtcactatggatttggctggcggcggtgatcggccttaacgcgctgaatatgctgatcggggttctgattggctgtagcatactctgcattaccttacttatggtcatccagcccgcggcgcactatgaagaagcccatcagcagtctcgatcttaatcttttactttgcctgcaacttttgttgcaggagcgcagcgtcaccaaagccgcgaagcggatgaacgtgacgccgtccgcggtgagtaaatcgctggcgaagctgcgcgactggttcgacgatccgctgtttgtgaaaacgcctttagggctattgcccacgccgctgacggtgagtctggaacaggatttggccgactggatgcagattggcaaccagatcctcgataaattccaccatagctctcctggcgggcttaagtttgtgctcgccgccgaaacaccgctgatgctgatccgctttaataccctgctggagcaggtgaatgaacgctacccacaggcgacggtgaagctgcgccaatgggattacgattcgctggacgccattacgcgcggagaagtggatctgggcttcaccgggcgtgaaacgcaccctcgctcgcgcgaactgctaaagctgatgccgtggtttatcgactacgaaatcctgttcagtgaccgtccgtgcgtgtatttgcgcgaggatcatcccgcgctccaggaagtgtgggatctggagacgtttctgcgctacccgcatatcagcatcttctgggaacgcagcgacacctgggcgctcgacgaggtgctaagagagatgggtcgggagcgtaacatcgccatgagtttgcccggttttgaacagtcgatgtttatggcggcccagccggatcacaactacattgccactgcgccgcactactgccatcactacaatcaactccaccagcgtaatctggtctgtctgcccattcccatcgatgaggcgcaggcagaaaagctcaccgtccccttcacgctgatctggcataaacggaacagccataatccgaaaatcctctggctgcgcgagacgatcaaagcgctgtataccgcaccaggtcaggtttttgcctaagataatgtaaagttcggtgctcaggcttctcttatttccatttactgattaaaacagaagctgagttaagcgataatcatgtaaccgtttaaccgactacgaccattatcaaggagcgaaaaatggctacgcactttgcacgaggaacattaacggaagggcatctcgtatcggccagactttcttcagcctgtcacaatgaggcgctcaaactacctgaacaccgcaggacgcggtttttagcttccagagcgctcctcgcagaactgctttttatgctgtacggcaccagcgaattaccggacatactcacccagccagaaggtcgtccggtttttgcggacccggcactcccccatttttccattgcgtacaccggcaacattgttggcgtcgcgctgacgacggaaggtgattgcggcctggatatggagctacaacgcgtcacgcgcagcttccatggtgctaacgcgctcgatgaatacccgctctccagtaatgaaaagctgtggatacgtaaccagaacgaccccgttgaagccagagcgcagctcatcacccttcgccagagcatccgcaaactgagcggcgcggcgtcagacgacgccagcctgttgcagctgctccccggctccggacgcctgcgcgcgacaaaagcctcgctggtagaggcactctgcgacgctgaggacgtactgatctggtccgttgcggtgacccccgccatcgaacggctgaaaatctgggagtttgacagcactcgcggttggcgtagtcttccggatgtacctgagcgcgccaacgagcccgccgcgcgcctgatgcgattaaccagtttaccggcagaaaaagcatacacccatagctgatccgtccaggatcatcatgatgaaacaggagtaatcatgtctgatacgttgaaagttgttacgttactgggaagcctgcgcaaaggttcttttaacgggatggttgcccgtacgctgccgcagctggcgcctgcgggaatggagatcagtgccctgccgtccattggcgacatcccgctttatgatgctgacgttcagcaggaagaagggttcccgcagagtgtggaagcgatagccgagcaaatccgtcaggctgacggcgtggtgattgtgacgcctgagtataactactcggtgccgggtggtttgaagaacgccattgactggctgtcccgtttaccggagcagccgctgtctggtaaacctgtgctgatccagaccagctcaatgggcgccatcggcggcgcgcgctgccagtatcacctgcgtcagatcctggtgttcctggatgcgatggtgatgaacaagccggaatttatgggcggcgtgattcagaacaaggtcgacccgcagacgggtgaagtggtggatcagagtacgcgtgaccatctctctggccagctgaccgcgtttggggattatattaagcgggtgaaggcctgataaaaaagcccggtggcgctagcgcttaccgggcctacactcgtcagtaggtcaggtaagcgaagcgccacctgacaccaccagcatcttagtgtgcatcaataaacacaatcttcagcacaaacagcagcgccacaataatcacgcacgggctaagttcgcggaagcggccggtaccgatcttcatcacgcagtaagagataaagcccagcgcgataccttcggtgatcgagaagctgaacggcatcatcaccgcggtaataaatgccggaacagcttccgtcagatcttcccacttcacgcgcgccaggcttgaggtcatcagcacgccgacgtagatcagcgcgccggctgccgcgtatggtggcaccatccccgccagcggagagaggaagatcaccagcaggaatagcagacccacaactaccgccgtcaggccggtacgaccacccacggacacaccggaagaggattcaatgtaagcggtaacagacgaggtaccgatgaaagagccagcaacggaagagatgctatccacatacagcgcctgcttcatgcgcgggaatttgcctttttcatctgccagacccgctttgtcggtcacgccaatcagcgtaccggaggagtcaaacaggttgaccagcatgaaggagaaaatcaccccggccagtcccaggttcagcgagcccgccagatcaacgtggccaatcacggtagagacgctcggtggcgcagagacgataccgctgtaatgcacgtcacccagcatccagcccagcagcgtggtcacaatgatagagaccagcaccgcagcatggatgttgcgcgatgccaggatcgcgatgataaagaagcccagcacgcccagcagcacgctgtgagaggtcaggttaccaatgctcaccagcgtttccgggttcgccacgataacgccagcgtttttcagccccatcatgccgatgaacagaccgataccgctggtgatgcccacgcgcaggctcacgggaatgttcgcaatcatccagtagcgcacgcggaagatggtcagcagcagcaggccgaccgcgccccagaaaatagcgcccatcccaacctgccacggcaggcccatcgcctgaaccaccacgaacgcaaagaacgcattcagacccattgccggggccagcgccacgggcagattagcgaaaacgcccatcaggatgctgccaagggccgcgatcagacaggtggttacaaagacggcgctggtgtccatgccagccacgcccagaatttgcgggttaacgaaaacgatatagaccatcgtcaggaaggtagtaaaaccggcgatcacttcggtgcgtgccgttgtgccgtgctcgcgcagtttgaacacgcgctcaagcagcccctgaccagacgtctgggtagtgtgttgttgactcatcatcaatttccgaacaaggagggaaaattcgtcgctatcctataccaaaatgcgacaatagtggcggttacgggatacttttttcattgattttgcttatacggcaacgattgcgtcccggtgaactgccgtacgaaaacgttaaacttgttaaaagggaaaggcatgtccgaaattgaagcggtatttttcgactgtgacggtacgctggtcgacagtgaggtcatttgttcccgcgcgtatgtcgccatgttccatgaatttggtattacgctcgatctcgaagaggtgttcaaacgctttaagggcgtgaagctgtacgagatcatcgacatcattaacgaagagcacggggtggatctggtgaaagcggatctggaaccggtgtaccgcgccgaggtcgcacgcctcttcgacgccgagctggaagttatcgccggcgctaacgcgctgctggatgcgatgacggtgccgatctgcgtggtctctaacggaccggtcagcaaaatgcagcactcgctcggcaagctggagatgttgcaccacttcccggaaaaactgttcagcggctacgatatccagcgctggaagcccgatccggcgctgatgttccacgcggcgaaggcgatgaacgtcaacgtggagaactgcattctggtggatgactcatctgccggcgcgcagtcagggattgatgcggggatggaggtgttttacttctgcgccgatccgcacaacaagccgatcgaccatccaaaagtgacaacctttaccgatctggcgcaactgccagcgttgtggaaggcgcgcgggtgggatattacgcgttgaattaacgtagggcgggtaagcgttagcgccacccgccacacatatcactctttcggatctttacccgccagcagcttgtccagctcgtcgccgcccacgtgtcggaaatcctgccccttcacgaagtagaagatgtattcgcaaatgttctggcaacggtcaccgatacgctcgatggagcgcgcgcagaacagcgcggtcagtacgcttggaatggtacgagaatcttccatcatgtaggtcatcagctgacgcacaatgccttcgtattcctggtcaactttcttgtcttcacggtagatacggaccgcttcgtccagatccatgcgcgcgaaagcgtccagcacgtcgtgcagcatctgcacggtgtggcgcccgagagactccaggctcaccagcagcggctggtgctgctgggagaatttctccagcgcggtacggcagattttatccgccacgtcaccgatacgctccagctcggcgatggttttgatgatcgccatcaccnnnnnnnnnnnnnnnnnnnnnnnnnnnnnnnnnnnnnnnnnnnnnnnnnnnnnnnnnnnnnnnnnnnnnnnnnnnnnnnnnnnnnnnnnnnnnnnnnnnnnnnnnnnnnnnnnnnnnnnnnnnnnnnnnnnnnnnnnnnnnnnnnnnnnnnnnnnnnnnnnnnnnnnnnnnnnnnnnnnnnnnnnnnnnnnnnnnnnnnnnnnnnnnnnnnnnnnnnnnnnnnnnnnnnnnnnnnnnnnnnnnnnnnnnnnnnnnnnnnnnnnnnnnnnnnnnnnnnnnnnnnnnnnnnnnnnnnnnnnnnnnnnnnnnnnnnnnnnnnnnnnnnnnnnnnnnnnnnnnnnnnnnnnnnnnnnnnnnnnnnnnnnnnnnnnnnnnnnnnnnnnnnnnnnnnnnnnnnnnnnnnnnnnnnnnnnnnnnnnnnnnnnnnnnnnnnnnnnnnnnnnnnnnnnnnnnnnnnnnnnnnnnnnnnnnnnnnnnnnnnnnnnnnnnnnnnnnnnnnnnnnnnnnnnnnnnnnnnnnnnnnnnnnnnnnnnnnnnnnnnnnnnnnnnnnnnnnnnnnnnnnnnnnnnnnnnnnnnngatggttttgatgatcgccatcaccagacgcaggtcgctcgccgtcggctgacgcttcgcaatgatgcgcacgcaggcttcgtcgatggcgacttccatcatattgacgttgtggtcgccttcaataacgcgcttcgccagctcgctgtcctggttgtgcatcgccgtgatcgcatcagaaagctgctgctcgaccatgccgcccatggtcatcacctgggtgcgaatgctttccagctctgcgttaaactggccggaaatgtgtttattaagattgaggttgtccatggtttctccacatgcactaaggcaaatcaaccgtagcggccagtaatataatcttcggtttgtttcttcgccggacgagtgaacagcgcgtccgtatcgctgaactcaatcaactcgcccagatacataaacgccgtgtggtcagaacaacgtgcagcctgctgcatgttgtgggtcacgatcaccacggtgtaatcctgcttcagctcggtgatcagctcttcgatacgcccggttgagatcgggtccagggctgagcacggctcatccagcagcaagacttccgggcgaatggcgataccgcgcgcaatgcacagacgctgctgctgaccaccggagagagagtacccactctggtgaagtttatctttggtttcgttccataatgcagccttggtcaatgcccactgcacgcgctcgtccatatccgcacgggagagcttctcaaacagacgcacaccaaaggcgatgttgtcatagatcgacatcgggaacggcgtgggtttctggaataccatccccactttcgcacgcagcagggcgatatcctgggtattggtcaggatgttgtcaccgtccagcagaatttcaccttctgcgcgctgctccggatagagcgaatacattttgttaaaggtgcgcagcagcgtggatttgccacagccggacggaccgatgaatgccgttacctggttctttgcgatatccaggttgatattcttcagggcatggaatttgccgtagtagaagttcaaatcacgaacctgaatcttacccggggcagtatcaaccatactcattgactcatttcctcattcggcgccgcgatgtgccgcgccgtaaaaatttaaccgtgtttcttcttcgcgaaaatgacgcgcgccagaatgttcagcaacagtacgcaaagggtgatgatcagcaccccggcccaggccagctgctgccattccgcgaatgggctcatcgcaaatttaaagatcgtcaccggcaggttggcgatcggctgcatcatgtccgtgctccagaactgattggagagggcggtaaacagcagcggtgcggtttcaccggcgatacgggcgatagccagcaggataccggtcatgatccccgagacggacgctttcagggtgatagccgaaatcatcttccatttaggcgtacccagcgcgtaagccgcttcacgcaggctgtccggcaccagtttcagcatgttttcagtggtacgaataacgataggcacctgcaacagcgccagcgcaatcacacccgcccagccggagaagtgttccatttgcgccaccacgatggtgtaaacaaacagacccacgacaatcgacggggcagaaagcagaatgtcgttaatgaagcggatgacttcagcgatccaggacttgcggccatattccgccagatagatacccgccatgatgcccaacggcgtaccgaaaacggtcgcccacaggatcaacaggccgctgcccgccagagcgtttgccagaccaccacccgccgtgttcggcggcggcgtcatctcggtgaacagcgccagggacattccatcaataccccgggtgatggtggacatcaggatccagatcagccagaacaggccgaacgccatcgttgccatggaaagcgtcaacgcaatgcggtttttaatccggcgctttgactgcattttgcgacgggattccgcaagctgagcggtgttttgcatgtcgagagttgccattagcgtgccccctcgtttttagccaaacgcataatcatcagcttggagatagccagcacaataaaggtgataacaaacaggatcagacccagttccatcagcgcggcgacgtgcagcccggattccgcttcggcaaattcgttcgccagcgcagaggtaatactgttccccggcatataaagcgaggcgctgtcgagctggtaggtgttgccgatgataaaggtgaccgccatggtttcacccagcgcgcggcctaagcccagcataatgccgccaatcaccccatttttggtgaacggaaggacgatgcgccagataacttcccaggtggtgcagccgatgccgtaggcggactctttcatcatcaccggggtttgttcgaagacatcgcgcatgaccgccgcaatgtacggaataatcatgatggcgaggatcacacctgccgccagaatgccgataccgaatgccgggccggaaaacagcgcccccacaaacggaatggcagagagaacgttaccgaccggctcctggaagtacgtcgcaaacagcggcgcgaagataaacaggccccacatgccgtaaacgatacttgggatggccgccagcagttcaatggcgatacccagcggacgtcgcagccagcctggcgccagttccgtcaggaacagggcaataccgaagctcaccggaaccgcaatcagcagggcgataaaagaggtcaccagcgtgccgtaaatcggcaccagcgcaccataaatatcgttcggcgcatcccactctttggtccacaggaaggcgaaaccaaatttttgaatgctcggccaggaggagaaaatcagggacacgataatgccgcccagcagcaatagcacaatcagcgcagccagtttcaccagcgcgctgaaaatcatgtcaccttttttacccggagggttaaatgcaggcttggttgcagccataaattactcttctgtttgagacgtttttacgaatatgcccggcggcgctgacgcttaccgggcctacagagtaaaccgtagggcgggtaagcgcagcgccacccgccatcttcgttaaatatatcctgttagtacagcgctttaccgctgctgtctttcacgttggttttccatgcagcacggatctgctcaaccacgctgtctggcaggctggcgtaatccagatcgttagcctgtttgccgccatttttatatgcccagtcgaagaacttcagcacttcagcaccctgctcaggcttcttctgctctttgtggaccagaatgaaggtggtagacgtgataggccatgcatcgtcgcctttctggttggtcaggtcctgcgcgaaggatttgctccagtcagcgcctttcgcggcgttggcgaagttctcttcggtcgggctaaccggtttgccgtcggcagaaaccagtttggtgtaagccaggttgttctgcttagcgtaagcgtattctacgtagccgatagagcctggcagacgctgtacgaaggctgcgataccgtcgttgcctttaccgcccagaccggttggccagttaacggtagagccggaaccgactttagatttccactcttcgttcactttcgccaggtagctggtgaacacgaaagaggtaccagagccgtcagcacgacgaaccaccgcgatattctgcgaaggcagcttaacgcccgggttcagcttagtgatggcttcgtcatcccattttttgattttgcccaggtagatgtcacccagggttttgccgtccagcaccagctcgcctgatttcaggccagggatgttaacagccagcacaacgccgccgatcacggtcgggaactggaacaggccttcctgattcagtttctcatcagacagcggagcgtcggatgcgccgaaatcaacggtattcgcggtaatttgttttacgccaccggaggagccgataccctgatagttgaccttgttaccggtctctttctggtaggtatccgcccatttggcatacaccggcgcagggaaggttgcaccagcgccagtcaggcttgctgctgcaaaggcagagaaagcgctcattgataaggtcgcggcgacaacagttgcgacagtggtacgcataactttcataatgtctcctgcaaggatttcgtaaatcattgtttaagtggctacgatgagcaaaataggacaaacaggtgacagataaatgtacgaaatatgacagttttatgacaaagccagcgatggatgtaaccacatgaaaaataaagccattaattcacagcatgttcatatttttgtcatcttttttgcaatgaatcagttttagcgtagctgatatgacaacggctgtcataaacagccgttgtcattttaatgagcgatttcaatcgtcagagttgccgttgcattgaactggcctggtttgggcctcgctcctgtcgcgctggcaggcgcgcttgaaaatgtcagcgtgcccagcgtatcccccatgatgtcgggaattttagtcgtttccgcttcaagggcaccgccattcgtattcacttcccgattatatttatcgtagactttaattcctacgtcttcgttgtccgtcgcaatcatcgaattatcagaagccacggctgaggcatgcagggttgcgtcgagcttgtcgtagaacatcatattggtgcatttgatgttcacggtacgagtgattttgcgatcggtcagcgctttccctttcgtcgacgaaaactctgacgccaggattttattgaaatcaaaaacaatggcctgcccctcgtcaatctcacaagattgaggaaccgtcactgttccctgaacaatcacatcagaaataatctcattcgaaacagtacgcgggtcgatcgtggcatagatattcgccaccagcgtcgccgggatcgtcatcaccccggtaaaggcttttttaacgtacaaatagacctgccccgagccgccactataaaacgtggtggcggaacttacaccgctgtgacattgatagggagtaccggttttattcggcagatgatcaaaaggcacggccgtataaccgacaccgagtatgtaaacaagcaagccaatatcaacgttttcattcaggttaaaataggcgacattgttcctgcttcccgctggctccagcgccggattaacgacgctggttatataggtgtgatcgtaactctgattcggcccggtcagacaatagcaagtacctttaaacgaggtattgttgttattcacatcaataagcgttgtcgtcccggctatattgtccgtaatggaaaactgctctgtaaaattgaggtagttatgatatttgccattgtctggcacacaataaccggttggggccgcatgcgcataaaagacgcaggtcagtaaggctaaaagccagtattgcagtttcattttaatcctttatcgacacgtgacgggcatctgcaccagtccagcgtcaggctgttgttgaagcgtgtattccgcccgacaggttgcgccgtcgtttagcgtcaacgtaaattgccccttttccggcaggcctgagagatagagttcgccctcttctccgacaatgcccgtaacgcttccggtgtccagcgttgccgatcccgttgccccaaaaggcgcaggtttgccattgctgagatgaacgttgaacaggatgcggtagccgatatgcgtaacgaattccgcttttactaccgctccacgggtgggaaccagattctggacgcttttttccagttcaacattgccagaggcaaagtcgctgtcgccaattgcgatacgattttcatcatagggtgacagctgcgtttttacggtgtagccgcgccagtccgtcgcgacaccgctgctgttttccaccgccaggcccgccgctcctggagctttcaccagcgcgacggtttctcccatttcctgtgagaaggtgacaccttctgaatgcagtagaatgccgccgctgacgccataattgagacttcgggtttcgttgctccaggcatagttacctttcatggagccataagccgcgtcccatgccagtcccgcattcccccccgtactgccgccactttcatcaacggattgctgtatgttccagttcaagttgttgttctgaagcagccttccgttcaggcctacctgatgggagacgctgtttttattgttgccagtaacgttatagttggcgtaggtgttcggtaaccactgggagagcggaagcgagagtgacaacatgaaaacgtgttcgttttcgccatccttttcccagtccccatcgtgatgattcgcagtatcggtatagttccatgacgcattccacgtcatctgtttccagctgttgctgtaaccaatctggatcagccgtgcaacgttatccgttcgccagtactgttcacggctcagcgtcaggtaaatatttccatacccctgcgcaaaaggttgtgtccacgttccctccagacggcttctgcggttacccgtttgccagaacgtctcgctatcgctcctgcgggaagcccactcatccagggtataaaatccttccgttgaatagcgatagcctactattcgcaggctggtattacttacatcgaacgtcttggaatagagaaaacgccaggattgcccctgctccgtatcatcgacaaaacgagacgccgcatgggtgacatccatcgatatcgccccgatctcgccgagttcctgaccaataccagccgctatggcagtgtaattctcagctaactgtgtgccgccatacagcgtcattcccccttgcatgccgcgtaaaagctgagcctgcaataaatcaggtgaatagcgatcgctgttgttcagttcgccaatgctgatatcaaagtccgtctggccttcccgtcgcaatatcgccagggaagcataaggctgcgtaaaatgctgctcactaccgtcttcttctttgatcgtaacgtcgagatcgcccccactgctggtggtgttgagatcggtcagggcaaacggcccctgaggaacagcagattgatagataatgtagccattctgacgaatggtgacgacggcattacttttagcaatgccccggacgacgggtgcgaagccgttcagactatccggcagcatgtcattatcggtgtacaggcgcacgccgcgcacctggctgctatcgaatagatcatttgccgtccaggtatcccccatcattatctggcttcgcaggctggcaatatcacgttgtaaatacgtactcgcagaatgataactgccgttgctgtttaccgcattgagggtgctgtagttgcgaagtcgccagctgccaaggttaataccgctacgcatgttcagataatacagatcgtcactgtcatagtctgatttcaacgtctgggtggttgaaaaatcataattcaccatcagggcattaataccctgatcccagcgtgaaggcggaatggcgtcacgcgctgaagaatccatataaatctgcgggatagagacccgtaacgcgagcttttcgtcatccagaacccatgtagctcccgccagcgggggaacgggctcgcagcggctggtgttaatcgtagccagtgcttttatggcatccacttttatgccaaacgtagccagcgtattttttaagtcgcggaaacagggctggagtgcgctctcgttgtttgttcgaaaaaaatggatttcacggcgctcaaaaaagcgctcgttgatataaatatcaacctgataatccccttcagggagattatcaggccggctaaactgactgatatcaatgtcgaccggatgttcaagttctaacaatcgtgagttaaaggtttcaccagcagcgtgcccggaatacgtgccgctgacccacagcgacaccagggataacataaaatagatgcgcttcaacgttaaccatctcgcctgagtcaaagggggtatttgatgacgtcgcttatcgcgccataatcattgatgctatgccaggtgagtgtcttactcgcgacgccagcgggtaagggaatgttgagcgtctcaaagggcttaatcatcgccaaatccagcggtttgccgtctacagcaacatcaataacgttgatatggatagccgtaggattattaaccaccagggtattgccttgtttgcgccagatgacttttaggctggcggtttcaggcttttcagtaatgctggcagggcgccagaataacttaatgcgcgttttaatcgcgatttccagcttgctgttctgtttgtccggcgttggagggatattcttaacattcagccaaaagacagattcccgctcggtgggtaaatcgccttttgttttaataatgcgcaatacgcgctcctgttttggctccagccttgaaacaggaggaataacggtaaacggtggtttcgttttctctgtggctaaaaaaggatcaatccatgcctgaatcagatagggtaaggaagtatcattattaattacagaaatagtggtatctgttttattgctggggaaaataacccgcgtaccaccgataataatcccaccccaggagggagaggcacacacgactaaaaagagaataataaaaatgtcgataaaacgcctgcgcatatcatatcctgtgacaggcctgcgaggtttcgctgtccattagacgtaaagaaacctgccttgccaggcctgattatatttcggaaagctagaggttaattactgtaagtgatagtaaattcagaatccgcatttgccacaccaggcgttacggttgcggaggtagcaatatagcgagccatgaacggcagtgtcgccttgccatcagcgtcgatatctgcactgactgactggttgtagagcttcagcaaggtgttgtcagcacggttgtagatggcaacggcaacccctgtagctccaccagcgttcagtttaaggtaaccgtctccatcttctgtaccatcaaagcgagcggtggcttttttatatgtatcagggcaattttcaagatcgatctggaaagcctgtacggaagccgtcgagcctgcaccagaaaaggcggatttattgactttaccaaggtcaacggtttgagtttgtgttggcgcagtaacctcacaggtgctgtcaataatttcgcctgtaaagtgtacagtaccattgccgttccccgcgtgcgcctgccaacctaaaagcaaagatgagcaaactaatgcgcttttaaaaagttttccattcattatgacattatccttaagttatgaataatcatgtttcattattaaaacaaatattgccgaaccatcccggccaggaaatagtatactgaaaaatgaaaataacaaggagaaataatattgtattaattattactgatggaataagagaataaacataagcgttttattacttaatataattttatatcacactgaaaagtcgacacactgtaattagtttttatttaataagaagtggaaaagtttatttttcagaaaatatttatgttttgatataaaaataaccccgtaatcataaattaacggggttattcctaagtgatatataatattattctacggtaacagacttcgccagatttcgcggctgatcaacgtcggtgcctttgatcagcgcgacgtgataagccagcagttgcagcggaacggtatagaagatcggcgcaatcacctcttccacatgcggcatctcgatgatgtgcatgttgtcgctgctggcgaaaccggcatctttatccgcaaagacgtacagaacaccaccacgggcgcgcacttcttcgatgttagatttcagtttttccagcagttcgttgttcggtgccaccacgataaccggcatatccgcgtcgatcagcgccagcgggccatgtttcagttcacctgccgcgtaagcttcagcgtgaatgtaagagatctctttcagcttcagtgcgccttccagcgcaatcggatactgatcgccacgccccaggaacagggagtgatgtttgtcagagaaatcttccgccagcgcctcaatgcgtttgtcctgagacagcatctgctcgatacggctcggcagcgcctgaaggccatgcacaatgtcgtgttcaacggaggcatccagacctttcagacgcgccagtttcgccaccagcatcagcagaacggttaactgagtggtaaacgccttggtggaagccacgccaatttcagtaccggctttggtcatcagcgccagatcggattcacgtaccagcgaagagcccggcacgttacagatggccagcgagcccaggtaacccaactctttagacagacgcagcgccgccagggtatcagccgtttcgccagactgagaaagggtgatcatcaggctgttacgacgcaccgcagatttgcggtagcggaactcagacgcgatttccacatcacacggcacgcccgccagggattcaaaccagtagcgcgagaccataccggagttataagaggtaccgcaggccacgatctgaatgtgctcgactttgcccagcagttcgttggcattggcgcccagctcgctcagatccacttcgccgtggctgatgcgcccggtcagggtgtttttaatggcgtttggctgttcgtagatctctttctgcatgtagtgacggtaagcacctttgtcgcccgcgtcgtattgcaggtttgattcgatctcctgacgcttaacctgctcgcctttcgtgtcgaatacggtcacgctgcgacgtgtcacctcggcaatgtctccctcttccaggaagataaagcgacgggtaaccggcagcagcgccagctggtcggaagcgataaagttttcacccatgcccagaccaatcaccatcggactaccggaacgcgcggccagcagcgtggacgggtcgcgggaatccatgatcaccgtaccgtaagcaccacgcagctgagggatagcgcgcagcaccgcatcacgcagtgtaccaccctttgccagctcccagtgcaccaggtgagcaatcacttcggtgtcggtttcagagacgaaggtatagccgcgcgctttcagttcttcacgcagcggttcgtggttttcgataatgccgttatgcaccaccacaatgtgttcagacacatgcgggtgtgcgttgccttcagatggctcaccgtgggtcgcccagcgggtatgtgcaataccggtgccaccgtgcagcggatgttcttccgcagcctgggccagcatctgcactttaccgagacgacgcagacgggtcatatgaccttctgcatcgaccacagccagaccggctgagtcgtaaccacggtattccagacgacgtaaaccttcgagaaggatttcagcaatatcacgctgcgcaactgcgccaacaattccacacatagttagatttcctgattatggcgttatgccatgcgttgtcgctgacctgtatttgccctttccgggcaccccgagccttgtagagagtggggttattttttatgggtactgcttgtgggggggagatatatatttatctcctctcccgggtttgcctgatgtcggctacgccttatcaggcctactcaatcgtagggcgggtaagcatagcgccacccgccttgttgttacttctgcttcaccgggcgtttccagccctgcttgctgacctgcggaacgcggcttaacaccagctcgttctcggccacatcgcgcgtaacggttgtcccggcggcaatggtcacgcctttgcccacggtgacaggcgccaccagctgggtatcggagcctacaaacacgtcatcaccgatgatggttttaaacttattggcgccgtcatagttacaggtaatcgtccctgcaccgatgtttacgttgtcgccaatctccgcgtcacccagataggtcagatgaccggctttcgatcctttaccgaggcgcgcttttttcatttccacgaaattgcccacgtgtgcgccttccagcagctcagcgcccgggcgcagacgcgcaaacgggccgatggtacatgccgcctcaagatgggcatcttccaccacgctgtacgggctgatttcgcagtcgtcgccgatcacgctgtttttaatcacacagccggtgccgattttgacgcggttgcccagcgtgacgttaccttccaggataacgttagtatctatttcaacgtcgcgcccgtgggtcagcgtgccacgcagatcgaaacgcgccggatcgcgcagcataacgcccgcgagcaacagcttttctgcctgctcggactggtaaatacgctccaggcgagaaagctggagacggttgtttaccccgtccgtttcgctgatgcgagccgggtgaacggcggcaatctcacgcccttcctggtacgccatcgcaatgatgtcggtgatgtagtattcaccctgcgcgttgttattgttgagtctggacagccagcgcttcatatccgcaccgttcgcaatcagaatgccggtgttgatctcctgaatctggcgctgttcgtcagtggcatctttatgctcaacaatcccggttaccttgccgttttcacgcgtaatgcggccatagccggttggatcgtccagcacgacggtcaacaaaccgatgccgccctgcggtttggcttcacgcaggcgagtgagggtttcaacggagatcagcgggacgtcgccgtagagcatcaggatatcttcatcatcagcgaagaagggtgcagcctgctgcatcgcatggcctgtacccaactgttctgcctgtagcacccagttgagattgtcatcacgcagcgtttttttcagcaggtcgccgccatgtccataaaccagatgcacctggctggcgcctaattcattcgctgcatcaataacatgctgaaccattggctttcctgccagcgtgtggagcaccttaggcagatcggaatacatgcgggtacctttgcctgcggcaaggatcaccacgctcatcgcactgtttaacatacgcatcctgacggtagtttgtgtgagaagtaaaaacgtttgatgcttaaaattctacatctttttcatcatgaattaaggccgaaaaaaaaagccagtctgggatccagactggcttttgtgcttttcaagccggtgttacatcgcttttttggtcaactcgataacgcgcagtttcgcgatcgctttggccagctccgcagacgcctgagcgtaatccacgtcaccatgagagctgctaatgtgctcttcagccttacgcttcgattccagggctcgcgcttcgtcgagatcctggccacgaatagcggtatcggccagaacggtcacactgcctggctgcacttcaagaatgccgccggacagatagataaactcttcatgaccgaactgtttaacgatgcggatcataccaggcttaatggcggtgagcagcggtgcgtgacccgggaaaatacccagttcaccttcactacccgttacctggattttctcgaccagaccagagaacatttgttgctctgcgctgacgacgtccaggtggtaagtcattgccatatcaccctccgattaaggcgttaaagttttttggctttttccacggcttcttcgatggaaccaaccatgtagaacgcctgctctggcaggtgatcgtattcgccttccatgatgcctttaaagccacggatggtgtctttcagggaaacgtatttaccaggtgcaccggtgaatacttccgcaacgaagaacggctgggacaggaagcgctggatcttacgcgcacgtgctaccaccagtttgtcttcttcagacagttcatccatacccaggatggcgatgatgtctttcagttcctgataacgttgcagcagggactgtacgccacgcgcggtgtcgtagtgctcctggccaacaaccagtggatccagctgacggctggtggagtccagcgggtcaacggccgggtagatacccagagacgcgatctgacggctcagtaccacggttgcatctaagtgagcaaaggtggtggctggggatgggtcagtcaagtcatccgcaggtacgtataccgcctgaacggaggtgatagaaccggttttggtagaggtgatacgttcctgaagaacacccatctcttccgcaagcgtaggctgataacctaccgctgaaggcatacgacccagcagtgcagatacttcagtaccggccagggtgtaacggtagatgttatcaacgaacagcagaacgtcacgaccttcgtcacggaacttctcagccatggtcaggccggtcagcgcaacgcgcagacggtttcctggtggctcgttcatctggccgtaaaccagggatactttatccagaacgttggagtcggtcatttcgtggtagaagtcgttaccctcacgagtacgttcacccacgcccgcaaacacggagtaaccggagtgctcgatcgcgatgttacggatcagctccatcatgtttacggttttacctacacccgcaccaccgaacagaccgactttaccgcccttcgcgaacggacacatcaggtcgataactttgatgccggtttccagcagttcctgagagctggacagctcttcgtaggaaggtgccgcgcggtggatagcccaacgctcttcttcaccgatgtcgcctttcatgtcgattggctgacccaatacgttcatgatacgacccagtgttgctttacctaccgggacttcgatcgggtgctcaaggtcttttacttccagaccacgacgcagaccgtcggaagaacccatggcgatggtacgcacgataccgccgccgagctgctgctgaacttccagcaccaggctctcgttaccattctgtacctcaagcgcgtcgtacacgcgtggtacggcgtcctgagggaactcgacgtccaccacggcgccgattacctggacaatctttccagtagccatcttgaatcctctacgtaattcgtaaacctggttaaaccgcggcggcccccgagacgatctcggtgagttcctgagtaatgctggcctgacgagctttgttgtaaaccaactgcagctctttaatcaggctgccgccattatcggtcgcggctttcatcgccaccattcgtgcggcctgctcgctggccaggttttctacaacgccctgataaacctgagattcaacgtaacgacgcagcagggtatccagcagcggtttcggatcgggttcatacaggtaatcccaggctttctgtttcagctcgtcatcttctgatgccggtaacggcagcatctgagtgagcgtaggcacctgagacatggtgttaataaatttgttgctgacaacgtacagtctgtccagacggccttcatcgtaggcctgcaacatcactttaaccgggccgatcagttcggacagggacgggttatcacccataccggtcacctgagcgacaatgttgccgccaacggagttaaagaaagagacgcctttagagccaatcagtgccagatcgcactgaacgcctttatcggaccagcctttcatatccgccagcagttttttgaacaggttaatgttcaagccgccacacagaccacggtcagtcgacaccaccaggtagcccacgcgcttaacgtcgcgttcttccaggtaagggtgcttatattccagattaccgttcgcaaggtgaccaatcactttgcgcatggtctctgcataaggacggctggccgccatgcgatcctgcgatttacgcattttggaagcggcgaccatctccatcgctttagtgatcttttgcgtgttctggacgcttgcgatcttactacgtatctcttttgcgccggccatgagcttctcctcaatgccagacggcttgtcctgagacaagccgccggacgattaccaggattgggttgctttgaaggaatcgaggatagctttcagcttgccttcgatttcgtcgttatagccaccggtctggttgatctcttgcatcagcggagcgtgatcacggtcgacgtaagccagcagagcggcttcgaagctaccgattttcgccagttccacatcttcgaggtaaccgcgttcagccgcgaacagtaccaggccctgctgagcaacagacattggcgcgtactgtttctgcttcagcagctcggtcactttctgaccgtggctcagctgtttacgggttgcttcgtccagatcggatgcgaactgagagaacgcagccagttcacgatactgtgccagcgcggtacggataccaccggacagtttcttgatgatcttggtctgagcagcaccacccacacgggatacggagatacccgggttaaccgccggacgaataccggagttaaacaggttggtttccaggaagatctgaccatcggtaatggagattacgttggtcggaacgaacgcagaaacgtcacccgcctgggtttcaatgatcggcagagcggtcagagaacctgttttacccttcacttcacctttggtgaagttctcgacgtattccgcgttaacgcgggaagcacgctccagcagacgagagtggaggtagaatacgtcgcccgggaatgcttcacgtcctggtggacgacggagcagcagggaaacctgacgataagcaacggcctgtttagacaggtcatcgtatacgatcagcgcatcttcaccgcggtcacggaagtattcgcccattgcgcaaccggcgtatggcgccaggtattgcagtgcagcagattcagacgcggttgctaccacaacgatggtgttagacagtgcgccgtgctcttccagtttacgaaccacgttggaaatggtggacgctttctggccgatagccacgtacacacatttgatgccggaatcacgctggttgatgatggcgtcgattgccatcgcggttttaccggtctgacggtcaccgatgatcagttcacgctgaccacgaccgattgggatcatggcgtcaacggacttataacccgtctgcactggctgatcaacggactgacggtcgataacgcctggtgcgataacttcgattggggagaagccatcgtgctcaaccggacctttaccgtcgattggcgcacccagggtgttaacaacgcgccccagcaggccacggccaaccggtacttccagaatacggccagtacacttaaccttcatgccttcggcaaggtcagcgtatggacccatcacaacggcacctacggagtcgcgctccaggttcagtgcgatagcgtaacggttacccggcagggaaatcatctcaccctgcatacaatcggccaggccgtggatgcggataacaccgtcacttacagaaacaatagtaccttcgttgtgagcttcactcacaacattgaactgagcaatgcgctgcttgatcagttcgctgatttcggtggaattcagttgcatgctccagtccccttaagactgcaagacgtctgcaaggcgctcaagacggccgcgtacgctgccatcaatgaccatatcacccgagcggatgattacgcctgccattacagacttatcgattttgcaattcagcttaactttgcgtgacagacgtttttccatcgcggcggtgattttcgcaagctgttcgttactcagttcagtcgcagaagttacttcaacttcagcggtagcttcactaagggcacgtaagtgctcaaactgctcgagaacatccgggagcacacggagacgaccattttccgccatcaccttaatcaggttctggccgttggcatccagttgctctccgcacacggcgataaacgacgcggcgagggtttcaggcgctaacgcaccagaaagcaactcggccatttgttcgtttttcgtcacctcagcggcaaacgccagcatattctgccagcgatcgacattttggtgttcgacagcaaagtcaaaagctgctttggcgtaggggcgagctaccgtaacaaattcagacatcagcccctccctccttacagttcagcgacaagtttgtccacgatgtcgctgttagcagcttcatccacggaacgttcgatgatcttctcggcgccagcaacagccagaatcgcaacctgcttacgcagttcttcacgagcacgtttacgctcagcttcaatttcagcctgagcctgtgtcacgatcttagtacgttcctgttctgcttcagctttggcttcgtccaggatctgagaacggcgtttgttagcctgttcaatgattacctgagcttcagctttcgcttttttcagctggtctgtcgcgttggcctgtgcaaggtccaaatctttcttagcgcgttctgcggaagccagaccgtcagcaatttctttctgacgtttttcaatggcagccattaaaggcggccatacatacttcatgcagaaccagacaaagagaataaacgcgatggcctggccgaggattgttgcgttcatgttcacagcacaatacctcttaaatttctgtggcttggggttttaaaacaactactacgcgacagcaaacatcacgtacagacccagacctacagcgatcattgggattgcatccaccagacccataacgataaagaactgagtacgcagcagaggaatcagatcaggttgacgcgctgcgccttccaggaatttgcccccgaggatgccgataccgatcgcagcaccgatagccgccagacccatcatcacagcggcagccatgtacagcagatccatattcaggttttccatgacagtctccagtttgtttcaattaaaacgtagtagtgttggtaaaaaatcagtgctcttcagacgccatcgacagatagacgatcgtcagaaccatgaagataaaggcttgcagcgtaatgatcaggatgtggaaaatggcccatggcacattcagaatccactgtgaccaccacggcagaagacccgcgatcagaatgaaaatcagctcacccgcatacatgttgccgaacagtcgcagacccagtgaaacaggtttggacagcaggctaacgccttccaggatcaggttgaccggaataaacgcccagtggttgaacggctgcaaggtaagctctttcacaaagccgcttacgcctttcattttgatgctgtagaacagaatgaggataaatacgcccagcgccatcgacagggtgatgttcacgtcggcagacggaaccacgcgcagtgcaggcaggccgagtacgtgctcaccgatccaaggtaagaaatcgataggcaggaggtccatcaggttcatcaggaagacccaaacgaacacggtcagggccagcggagcaatcagtttgctcttaccatggtacatgtctttcacgctgccatggacgaagccgatgatcatctcgatgaacgtctggaatttccctggaacaccgctggtcgcctttttagcaacgctgcggaacatggccaggaacagaagacccaaaaccaccgagaagaacatggagtcgatgttgatcgtccagaaggtggccggggggttatgtggatccaccagcgagaatgtacgcaggtccagctgaaggttattcagatggtgacctatgtaatcctgcggcgtcatattttctgaagccatgatgccttttaccctttgttattgattacagctggagccagaacttgtaccaccagcaccaaaacccacgttgctatcagcggcatgaataccactttcaaaaccgccagcgccatcaccagtagagcaaaggtcagcaacaccttacacacttcgccgagagcgaaggaccaggccacgcggcctttggcgggtgtatgcgcctgatgacgccaggcaaaaatcataaacaacacgtttggcagaaccaccgccaaacctccgcacgcggcggagatgccccagaaggggtctttgaggctaaacagcagtccacttgctatcacagccagaaactgaatgaacagaagcttacgagcaacgtttctactcaagagcgacacagacatcacgtttttactcctgctcccttcgaggtatgccgcgtgtcgtataaaacgtcctttaaggctcagagtcaagcatcaaaaagcggtcaaattatacggtgcgtacccgtgatttcaaacattaagtagcgaaaaggtgaataaatgtttaaatatttttccccagtcctatttttcaacttttgacctaagtgccgaccttcaggcaaaactgcaaacagcgcggaaacgttggtgataaagcgtgcacgagatcacaaaatacacatttgcgataaagtggtatttatcaaagacgtaaaacgatttatttcatctgtatgaaattaaagcaaaaaaatcgcaactatttttaaaacagagccgtatacaacaaaaaccttttattgacattcttaataaatatttaacattccattcttgttgcctttacccacttttagcaggctgatattttcatggttgattatcctcagagtgaacaactcacttcaggttaaccataagaaaacccatggtaacaacaaggttaaattaacaacggccaaaacagacgggatgtgctgctttttaacacgatcagaacagcacaaattccacattttttattaatttttaaaaagtgtttggcttaattatcaccagatgacgctcaccttcgagctgagggatctgaagtttctcaatggattcgacagcaaaaccgtccggaagctgctcgatttcgtcccccggaagttgccctttcagcgcataaaaacgccccttctccgccggcaggtgtttgcaccagctcaccatgtcattgagtgacgcaaatgcgcggctgataacgccgtcaaacggtggctcagccgggaactcctctaccctgctctgcacgggcgtgatgttttccagcttcagctcatgctggacctggcgtaaaaagcgtacgcgcttacccaggctgtccagcagcgtgaattgactctccggtcgaacaatagacaacggaacgcccggcaagcccgggccggtgcccacgtcgataaaacgttccccgttcagatatggcgccacgacgatgctatcgagaatatgacgaatcagcatctcgttgggatcgcgtacggaggtgaggttgtacgctttattccatttgttcagcatatcgacataggccaccagctgatttttctggtgatcggtgagcgaaatacctgcctgttccagcagacgagagagtttattgagcacggtggatacctgttgagaaacttaagtggcgggtggcgcttcgctaacccgccctacgggttcagtaggcccggtaagcgcagcgccaccgggcaattttcagagcattacgcgctgcggcgcagcataccctgctttttcagccacaccagcagaatcgaaatcgcggcaggtgtgacgccggagatacgtgaggcctggccaatcgacacaggtttgtgatcgttcagcttagcgatcacttcgttggaaaggcccgtcacctgacgatagtccagcatttccggcagcagcgtgttttcgttgcgctgctgtttttcgatctcatcctgctgacgcgcgatgtagccttcgtatttcacctggatctcgacctgttcagccgcttccgcgtcttcaaggcccggcgcgaacgcggtcagtttgaccagattctcgtaagtgacttcaggacgacgcagcagatcttccccgctggcttcgcgcgacagcggtgctgttaagtgagcgtttacttcggcagcggtttccgcctgcggattcacccaggtggttttcaggcgctgacgttcctgttcgatacgctccagcttctcgttgaagcgcgcccagcgttcgtcatccaccagacccaattcacggcccacctcagtcagacgcagatcggcattgtcttcgcgcagcatcaggcgatattccgcacgagaagtaaacatgcggtacggttctttggtccccagcgtgcagagatcgtcgaccagaacgcccaggtaagcctgagaacgcgccggtgcccagccctctttctcggcagagaagcgagcggcgttcagaccggccagcaacccttgtgcggcagcttcttcgtacccggtggtaccgttaatctggcctgcgaagaacagaccctggatgaatttgctttccagcgtcggcttcaggtcgcgcggatcgaagaaatcgtactcaatagcgtagccaggacgaacgatcttcgcgttttccatgccctgcattgaacgcacaatctgcatctgcacgtcgaacggcaggctggtggagatgccgtttggataaatttcgttagaggtcagcccttcaggttcgaggaagatctggtgctggttacgatcggcaaatcgcatcactttgtcttcgatcgacgggcaataacgtgggccgatcccttcgatcacaccggcgtacattgggctgcgatcgaggttattgcggatcacgtcatgggttttttcattggtgtgcgtgatgtagcacggcacctgctgcggatgctgagccgcattgcccatgaacgagaacaccggcatcggattatcaccgtgctgttgcgccagcacgctgaaatcaatggtgcgcgcgtcaatacgcggcggtgtaccggttttcaggcggctgacgcgcagcggcagttcacgcagacgacgtgaaagtgggatagacggcggatcgccagcacggccaccgctgtagttatccaggccgatatgaatttttccgtccaggaatgtcccgacggtcagcacaaccgcttttgcgcggaacttgagccccatctgggttacggcacccacgacgcgatcgttctcgacgataagatcttcaactgcctgctggaagatcatcaggttcggctggttctccagcgcggtgcgcacagcctgacggtaaagcacgcggtctgcctgtgcgcgggtcgcacgaacagcaggccctttactcgcgtttagtatcctaaactggatgcctgcatgatcgatcgctttcgccatcaggccgccaagtgcatccacttcttttaccaggtgtcctttcccaatgccgccaatcgccggattacaggacatttgtcccagcgtgtcgatattgtgtgtcaaaagcagggtctgctgacccattcgcgctgcggccattgcggcctcagtgcctgcgtgacccccgccaatgatgatgacgtcaaaaggatcctgataaaacatggtggtctgcctcgcgtaaagcggtatgaaaatggattgaagcccgggccgtggattctactcaactttagtctttcgagaaagcattgggatcctgggctattaaaaagaagatctttttatttagagatctgttctattgtgatctcttattaggatcgcagacctctgtggataagtccgatcccataaataagatcatgcagttaggaaggatcgtttgctgtgaatgatcggtgatcctggaccgtataagctgggatcagatcgccactttatacacaggtcaaaaactaaaccaacgttgttctttggataactacggcttaatacgagcttttaaccagagttatccacatctgatcgcacgatctttaatcgtttttgagtaaatttttccattccgcgagccagatctcggctggatcttcgggaatatcatgatcgaggatgttgatctttagcgtttcacccagctgttttgctccgcaggcggtcaccgcagcttctactttctctatggcgccacagaaagtgtcatattcacggctgccgatccccacagcgccaaaccggacgtttgacagatcgggctgttgttccagcagttcgtcatataaaggttgcaggttatccggcagatcgcccgcgccgtgcgtggaggtgatcagcagccagaccccgtcagtcgggagatcttccagcagcggtccgtgcagcgtttgtgtagaaaagcccgcatcttccagcttctcagccagatgttccgctacatattccgcaccgcccagggtgctgccgctgataagagtaatgtccgccattgatcgctcgctcagataaagaggcggccattgtacgctgtgaacgagctgggatctacctgtggaaaatgtgggaatgaaattgcccgatcacgggcggatagtacgcatgatcgggttttgcagggagatcagggtttcagtggactgaatttcatcgattgtttggatcttgttgataagtacctgctggagggcgtcaatggatcggcacatcacctttataaagatgctgtagtgcccggtggtgtagtacgcctcggtgacttcatccagcgcgttcagtttctccagcgcggaggggtaatctttggcgcttttcagaataatgccaatgaagcagcagacgtcgtagccaagttgcttcgggctgacatcaatgcgtgcgccggtgatgatcccggcctgcttcattttctcgacgcgaacgtgaatggtccccgggctgacgccaaattgtttcgccagttcggcatacgcggtgcgtgcgttggccattagcgcttccagaatgccgcggtccagattgtcgatctgataattttccataggtttttcttatgaagattaatgattccctctattctagcgtcttattttaacgaatcaaaagtgaaggaggctttttgttgatgggttattgaattaagcgcctgttctgttgcttaatcagtatcaacaggacgcaggagtataaataatgaaaaccgcttacatcgcaaaacaacgccagatcagtttcgtaaaatcccatttttcccgccagctggaagagaagcttggccttattgaagttcaggcgccgattctgagccgcgtgggtgacgggacgcaggataacttgtctggttgcgaaaaagcggtacaggtaaaagtgaaaacactgccagacgcccagttcgaagtggttcattccctggcgaagtggaagcgtcaaaccctgggacaacacgacttcagcgcgggcgaagggctttacacgcacatgaaagcccttcgccccgatgaagaccgcctttccccgattcactctgtctacgttgaccagtgggactgggagcgcgtaatgggagatggcgagcgtcacgtcggtacgctgaaatccaccgttgaggcgatctacgccgggatcaaagcaaccgaagcggccgtgagcaaagagtttggtctggcaccgttcctgccggaaacgatccactttgttcacagtcaggaattgctgagccgtttcccggatctggatgccaaaggccgtgaacgcgcgatcgccaaagagctgggcgcggtattccttatcggcattggcgggaaattgtctgatggtaaacgtcacgacgtccgtgcgccggattacgatgactggagcaccgtgggcgaaagcgaatatgccggtctgaacggcgatattctggtctggaacccggttctggaagatgcgtttgaactctcttcgatggggatccgcgtggatgctgaagcactgaagcgtcagctggccgtgaccggtgatgaagatcgtctgcaactggagtggcaccaggcactgctgcgcggtgaaatgccgcagaccatcggcggtgggattggccagtctcgtctgaccatgctgctgctgcaactctctcacattggtcaggtacagtgtggggtctggccgcagcaggtacgtgagagcgtcggttctcttctttaattaacgtcgccagcgtctgagcaggcggctacgcaacccggtatcaaagcgccagatgtgatcgaagatgcgcatgatgccgggttttccatgtgcagacatcgccacggcatggaaacggtgctggtgcacgcgctgcatctccttcactttattcacgacgtcgtccggcagccgctgggcgataaaatcggaaatcaccaccgcatccgcgtcgtaccagtctccgccctgcatgcgctcaatgatgctgcgaaaacagctggccagatcggtgccgccgcgaaagcgctggcttaaaaagcggatcgcctgctccagcccctgtgggctggtcagttcatacccaacaacttcgctggaaaagagcatgatgtagcagcgacgacgatcggcaagcgccacgcgcatcagagccaggcagaacgcttttgcacactgttcattaaagccccccatcgatccagacgtatcgacgcaaacaatgaatgggccgcgcggttgctcatcaaaatcctggtgtaccaccggacgctggctgatcttctcgcgccaggcttcgccatgcagtcgataggtaatgagctgtttttccaccagccgacgataaaactcatactccagttcggtcatgcccagcgtgctgagttccgtaggcagcaggcgcaggatgtcatcgctttgctgtagcccgtccacctgctccggtacggtggagggttcacgtaccagcgtacggaaggtttccatcggcgcatctttctttgggaccgaccgggcctcccgggaacggccgagctgttctgcgagcttcatcagctccggctgttgtgccagaaagtcgccgtacttcacgatcagctgataatcgccccgttttaactggccggcactcatatcccagagtcgaccggcggcgttttcattctccaccagcacctgttctaactggccgctcagggtcattcgctcctggacttcactgagcaactgttcgcgctcttcgtccagcaactgctgattaagggccgtggcctggaccacaaggctcagacgccagcgctgtaaaaacagcgtatgcagggcgggagtaaagctggggttgtcagtgaccagcgctctggcctggctggcaaacggggagtgaacgttatcaagcagcgtcagggtttgctgtagctgggcaataaactgcggtgttgaaagccgctggcactgctggtaaccagccacttcctctgtcagttccggcgggacttccgtctccttaaaccgctgtcgcaggttatcgcgccagcggggcagatcgtccgtcattgcttttcggagcttcgggaatttttcaaagaaggccgccagctgcggtgaagcgagcagggtaatgacgacctcttcgatcaacccttcctcgctaaccgccagcatgacgttaagcgtgtccagcgttagcattgacgcgcctgtttgatctgcgcgctgacatcctgcaagctggcttcaatgcgacctaaccagtcgctatggataaagaggcatttctgctgctcgctgaagcgcgtgtgctgctgatgccattcgttatccagcgcgtcgagctgctgtttgatctcctccggaacagtatcggaggccgtgcccggcagcgccaggcgcgatccctgaaggctgacgtcgcggatcacaaggtgctggctgctgtcgacttccatcgacagcggctgtgcaaagccgataccgttgagtttaccgcggatctcaccgcctttatccagccactgaaccagcgcaacgcgttcgatcgtcacgtgcacaacctgcatatcatgaagcttcagcggttgctgaagaagaagcgtgagcgaggcgtcagtcagcccggcgggcagttcatagtgcggtttacgggcaaacatcccgccaagacggttcaccttcagcgcggttttgtcactttgctgctgctggagctgaaggcgacgttgggcaatcgcgcctagttgattaagcatcgactgttgaccccacgcgtgtccggtcatcaaaacgtccagctgctgttgcatcagattcatcccttctgcgtcgtgccacaggcagtctttcagcaggatcagatcgattggggcgacagcatcgcggccgctaaacagcgcgcttgcctggagcaggcgaatggcttttttccagcgacgatcggagacgtacggcgcggaaggcagcaaatcaagctgctggcgcagcatgaagatcagctcaaaaacgggatcgggcagttttatcttgccgatctcctcctgccactggtggtattcctcgtccgtgacctgcaatgacgctgccaccgggttttcgttttcatcctgctggcttaccagcatagaacggaagtttgatttatcctggactttatccagccacaggcggatcagcatacggtcatacagcgcttccaggctgctgtcggcttcgggcaattcgttagacgcggccaccagcaggcgcatggggatcttctcttcgctggcgccgttgcggaagcggcgttcgttaattgccgtcaacagggtattcagtatggccgggccggctttccagatctcatcaagaaagacgatttccgcttccggaagatagcccgccgtcagacgttcatagcgtccctcatcttttaacgcctgaatggagagtgggccgaaaacttcttccggcgtggagaagcgcgtcatcaaatactcgaatgcgcgcgcgttctggaaagcgaatttgaggcggcgtgcgatcagacttttggcaatgcccggcgggcccagcagaaatacgctttccccactcagcgccgccagtaaacagaggcgaatggcgtggctacgctcgtaaaggcctttctccagcgcactgctgaggcgggaaattctttctgctaataaatgtgagtgagccataatagttttgcatcctttcgccgtcgtggcggctaattgaagcgagtatagacgtttcggtctggcctggtaataggctgaagtgcggcgctattttctttgcgctacattaatgcggctgcatttaggggtacgattttgcattgaatcgtgcatactgtgcgctttttgtgggccaagggactaagcacacatttgttattcaaacgaaaagactagtctatgagcactgataataagcaatcattacccgctgtaacgcttgcggcgatcggggttgtctacggtgatatcggcaccagcccgctttatacgcttcgtgaatgtctgtccggtcagtttggttttggtgtagagcgtgacgccgtatttggtttcctctcgctcatcttctggctgctgatcctggtggtctcccttaagtatctctctttcgtaatgcgggctgataacgcgggcgagggcggtattctgaccctgatgtcccttgccgggcgcaatacgtccgcaagaatgacctccgtgctggtcatcatcggcctgattggcggcagcttcttctatggagaagtcgtgattacgccggcgatttctgtaatgtcggccatagaggggctggagattgtcgcgccacagcttgatacgtgggtggtgccactcgctattatcgtgctgacgttgctgtttgccatacaaaaacacggtaccgggctggtgggtaagctgttcgcgcctattatgctggcctggttcctgatcctggcggcgctgggcttacgcagtattatcgccaacccggatgtcctgcacgcgctgaacccaatgtgggcggtgcatttcttccttgaatataaagtggtgtcgtttgtggcgctgggcgcggtggtgctgtccattaccggtgttgaagcgctgtatgcggatatgggccacttcgggaaactccctattcgcgtcgcctggtttagcgtggtcttgccttcactggtgctgaattacttcggtcagggcgctctgctgcttgcacaccctgaagcgattaaaaacccgttcttcctgctggcgccggactgggcgctggttccgatgctgatcctggcgacgctggcgacggtcattgcctctcaggctgtcatttccggcgtattctccctgacgcgtcaggccgtgcgtttgggttatctctccccaatgcgcattatccatacctcggagatggagtctggccagatctacattccgttcgtcaactggctgctctatttcgcggtggtgattgttatcgtcagctttgagcactccagtaatctggcggcggcgtacggtatcgcggtaaccggaacgatggtgttgacctctattctctccaccaccgtggcgtaccgtaactggcactggaataagttcctcgtggggctgatcctggttggcttcctctgcatcgacgtgccgctgttctctgcgaacctcgacaagattgtctccggcggctggctgccgctgacgctgggtctggtgatgtttattgtgatgacgacgtggaagagcgaacgtttccgcctgctgcgtcgtatgcacgagcacggtaactctcttgaggcgatgatcgcctcgctggagaagtccccaccggtgcgagtgccgggcacggcggtgtatatgtctcgcgcgctgaacgtgatcccgtttgcgctgatgcataacctcaagcacaacaaagtgctgcacgagcgcgtgatcctgctgacgctgcgtaccgaagatgcgccgtacgttcacaacgtgcgtcgcgtacagattgaacagctgtcgccaaccttctggcgcgtggtggcaagctacggctggcgcgaaacgccgaacgtggaagaggtgttccaccgctgcggtctggaaggcctgagttgccgcatgatggagacgtcgttctttatgtcccacgagtcgctgatcatcggcaagcgcccatggtatctgcgcctgcgcggcaagctgtatctcattctgcaacgtaacgccctgcgtgcgcctgaccagtttgagatcccgcctaaccgcgtgattgagctggggacgcaggtcgagatttaacccttctgaatatgccgggtggcgctgcgcttacccggcctaccagacccgtaggcccgtgcaagcgtagcgccgccgggcaattttcctctattgcatttcacttagcgaaacgtttcgacgttgatcacaaatccgttacgtcatgatggttttctgaacacttctgcggctacactgtttttagcgaaacgtttcgctagtggagcaaaaaatgaagaaaggcacagtactcaactcagaaatctcatcggtgatttcccgtcttgggcataccgatacgctggtggtttgcgatgcaggcttaccggttccgcgcagcacaacccgtatcgatatggcgttaacgcagggcgtaccctcgttcatgcaggtactggaagtggtcaccgcggagatgcaggttgaggcggccattctcgcggcggaaatcaaacaacataatccgcaactccacgaaacgttgctcagccacattgagcaactgcaacagcaccagggaaacaccatagaaattcgttacacaacgcacgagcagttcaaacaacaaaccgcagacagtcaggcggtgattcgcagcggggagtgctccccgtatgcgaatatcattctctgtgctggcgtcaccttctgaggccatcatggacgcattactgcaactcaaagggatcgataagtcgttcccgggcgtaaaagccctctccggtgcggcgctgaacgtctattccgggcgcgtcatggcgctggtgggcgaaaacggcgccggcaaatccaccatgatgaaagtgctgaccggtatctaccaacgcgatgccggttcgctgctgtggctgggtaaagagaccacctttaacggcccgaaatcctctcaggaagcgggcatcggcatcatccaccaggagttgaacctgatcccgcagctcaccattgcggagaacatcttcctcggccgtgagttcgtgaaccggtttggcaaaatcgactggaaaaccatgtatgccgaagcggacaaactgctggcgaagctgaatctgcgctttaagagcgaccgactggtgggcgacctttccatcggcgatcagcagatggtggaaatcgcgaaggtgctgagcttcgagtcgaaggtcatcattatggatgaaccgaccgacgccctgaccgataccgaaaccgaatccctgttccgcgtgatccgtgagctgaaatcccagggccgcggcattgtctatatctcacaccgcatgaaagagatcttcgagatctgcgacgacgtcaccgtctttcgcgacgggcagtttattgccgagcgcgaagtggcaaccctgaccgaagatacgctgattgaaatgatggtgggacgtaagctcgaagatcagtatccgcatctggagaaagcgccgggagagatccgcctgaaggtggataatctctgcgggccgggcgtgaatgacgtctcctttactctgcgcaagggcgagatccttggcgtcgcgggcctgatgggcgcggggcgcaccgaactgatgaaagtgctctatggcgcactgccgcgcaccagcggctacgttaccctcgacggccatgaggtggtcacccgctcgcctcaggatggcctggcgaacggcattgtctatatttctgaagaccgtaagcgcgacggcttagtgctgggcatgtcggtgaaagagaacatgtccctgactgcgctaggctatttcagccgcagcggcggcagcctgaaacacaaagatgagcagcaggcggtcagcgattttatccgtctctttaacgttaaaaccccgtctatggagcaggcgattggcctgttgtccggcgggaatcagcagaaagtggcgattgcccgcgggctgatgacgcgcccgaaagtgctgatcctggatgagcccacccgcggcgtggacgtgggcgcgaagaaagagatctatcagctgattaaccagttcaaggccgacggtctgagcatcattctggtctcttccgagatgccagaggtattaggcatgagcgatcgcattatcgtcatgcatgaagggcatctcggcggtgaattcactcgcgagcaggccacccaggaagttctgatggctgccgctgtgggcaagcttaatcgcgtgaatcaggagtaagaagatgactacccaggctgtttctggtcgccgctatttcacaaaggcatggctgatggaacaaaaatcgctgattgccctgctggtgctgatcgcgattgtctcgaccatgagcccgaacttttttaccgtcaataacctgttcaacattcttcagcagacctccgtcaacgccattatggcggtggggatgacgctggtgattttgacctcgggtatcgatctgtccgtcggttccctgctggccctcaccggcgcgatcgccgcgtcgattgttggtattgaggtcaacgcgctggtggccgttgccgctgcgctggcggcaggtgcggcaattggcgccgtaaccggcgtgattgtggcgaaaggtcgcgttcaggcgttcatcgccacgctggtgatgatgctgctgctgcgcggtgtgaccatggtgtacaccaacggcagcccgattaataccggttttaccgataacgccgatctgtttggctggttcggtattggtcgcccgctgggtgtcccgaccccggtctggatcatggctatcgtcttcctggcggcatggtacatgctgcaccatacccgtctgggtcgttatatctatgcgctgggcggtaacgaagcggcaacgcgcctgtccggtatcagcgttaataaagtcaaaattatcgtttactccctgtgcggcctgctggcgtctctggcgggcatcatcgaagtggcgcgcctctcctccgcgcagccaacggcgggtacgggctatgagctggatgccatcgcggcagtggttctgggcggtacgagccttgcgggtggtaaaggtcgcattgttgggacattgatcggcgcactgatcctcggtttcctgaataatggtttgaatttgttaggtgtttcctcctattaccagatgatcgttaaggcagtggtgattttgctggcggtactggtagacaacaaaaaacagtaactgacgacactacaggacatcttagatatgaacatgaaaaaactggctaccctggtttctgctgtcgcgctgagcgcaaccgtaagtgctaacgccatggcgaaggacaccatcgcgctggttgtctctaccctgaacaacccgttcttcgtctccctgaaggatggcgcgcagaaagaagcagataaactgggctacaacctggtggtgctggattctcagaacaacccggcgaaagagctggctaacgttcaggacttaaccgttcgtggtaccaaaatcctgctgatcaacccaaccgattccgacgcggtcggtaacgccgtgaagatggcaaaccaggcgaagatcccggtcatcacccttgaccgtcaggcaacgaaaggggatgtggtcagccacattgcgtctgataacgtactgggcggtaaaatcgccggtgactacatcgcgaagaaagcaggtgaaggcgcgaaagtgatcgagttgcagggtatcgccgggacttccgcagcccgtgaacgtggtgaaggcttccagcaggctgtagcggcgcacaaattcaacgtgctggcgagccagccggcagacttcgaccgtacaaagggcctgaacgtcatgcagaacctgctgaccgcgcatcctgatgtgcaggcggtattcgcacagaacgacgaaatggcgctgggcgcgctgcgtgcgctccagactgcgggtaaatcagatgtgatggttgtcggatttgacggcacgccggatggtgaaaaagcagtaaatgatggcaaactggctgcgaccatcgctcagctgcctgagcagattggcgcgactggcgtgcaaactgccgataaagtgctgaagggcgaaaaagttcaggccaaatatcctgttgacctgaaactggtcattaagcagtaaaggcgattcaggcagtcgctggctgcctgagggacaccaaataaaagaaaagtgtggcatacgccaccgggtaagaccggtggcgctctcagatggacacctcaatacatgaaaaccgcaggcaacctcgtcgtccttggcagtatcaatgccgatcacattcttaaccttgaaacgttccccactccgggcgaaaccgtcactggcaatcagtatcaggtggcgttcggcggtaagggcgcaaaccaggcggttgccgccggacgcagcggggcgaatatcgcgtttatcgcctgtacgggtgatgacgataccggcgagcgcgtacgcaaacagctggcaagcgacaacatcgacattgcacccgtcagcgtggttgcaggggaatctaccggcgtggcgctgattttcgtcaatgcggaaggtgagaatgtcatcggtattcatgcaggggctaatgccgcgttaacgactgaacgcgtcgaagcgcagcgtggaatcatcgccggagcggaagccctgctgatgcagctggagtcaccggttgaaagcgtgctggccgccgcgaaaattgcgcatgaaaatcatacgtctgtcgtacttaaccctgcgcctgcccgtgtattatcagatgagctgctggcgctggtggatatcatcaccccgaacgaaaccgaagcggaaaagctgacgggtatccgtgtcgaaaatgatgacgatgccgcgcgtgccgcgcttgcactgcatgaaaaaggcatcggcaccgtaataatcaccctcggcagccgtggggtgtgggctagcgtcaatggcgaaggccgtcgcgtaccgggctttaaggtcaaagccattgataccatcgccgcaggagacaccttcaacggtgcactggtaacggcgctgctggaaggaaaagcaatggatgacgcgatccgcttcgcgcatgccgccgctgcgattgcggtgacgcgtaaaggcgctcagccttctgttccatggcgtaaagagattgatgaattcttaagtcagcaggggtaacgcttggccacaatgaaagatgtcgcccgtatggcgggcgtttctacctcgactgtctcccacgtaatcaataacgatcgcttcgtcagcgaggcgattcgggagaaagttgacgctgcaattaaagaactcaactatgcgccgtctgcgctggcccgcagcctgaagctcaaccagacgcgcaccatcggcatgctgatcacggccagtaccaaccctttttattctgaactggtgcgcggcgtggagcgcagctgcttcgagcgcggctacagcctggtgctgtgcaataccgaaggcgatgagcagcgcatgaaccgaaacctggagacgctgatgcaaaaacgcgtcgacgggctgctgctgctctgtaccgaaacgcatcaaccctcgaaagagatcatccagcgctacccttctattcccacggtgatgatggactgggcgccgttcgacggcaccagcgatctgattcaggataactcgctgctgggcggcgatatggcgactcagcatctgatcgataaaggtcatacccgcattgcctgtattaccggcccgctggataaaaccccggcgcgcttgcgtctggaaggctatctttcggccatggaacgggcggggcttgccattcctgatggctatcgcatcaccggcgatttcgaatttaacggtggatttgaagcaatgcagaaactgctggcgcaagagccgcgtccgcaggcggtgtttatcggtaacgatgcgatggcattcggagcatatcaggcgctgtatcaggcgggattacgtgttccggacgacatggcgatcgtcggttacgatgatatcgaactggcgcgctacatgacgcccccactgaccaccatccatcagccgaaggatgaactgggcgagctggccatcgatgtgttgatccaccgcatggcccagcccacgctgcaacagcaacgtttgcagcttactcctgttctgatggaacgcggttcggtttagccttctctttgtgacgctctttaatcaggttccggccgtcttttggttttaacaacataaagaccaccgccgataccacggtaagcgcgcccatagtgataaaggtatagtggaactgctcaacggtattggttccctcgaacccttcataaaaccgcagtaccgccgcgctcacggcaaccccgaggctgatcgacagctgttgagtgaccgccagtacgctgttgccgctgctggcattctcgtcggtgaggtccgcaagggtgatggtgttcatcgacgtaaactgcgtcgacatggccatacccagcacaaacagcggcaggatcagcatccagattggtaacgccgcagattgcagggagaactgcgcaatcatcaatccgataaagatcgtcacgccaaccagcgtcttacgatagccaaaccagcgcagcacctgcgtgaccgtcgattttgccagaatcgagcccatcgccgtgggtgccatcatgcagccagcaatcagggccggatagccgaaaccgacctggagcatcagcggcatcaggaacggtacgcagcccgtgcccagacgcgaggcaatattgcccgcgatcccgacggagaacgttcgggtgttaaacagagataaagagataagcggtgtcggatggcgacgcgcatgacgtatatatagaaggaacagcagaataccgctgaggatgacggccagcgccagccacgtcgctacgattttctcgccaaacagctccatcccgctggagaacaggaccaggctcaggccaaacaggaagaaaccacccatatcgaagctgcgtcttggcgtggtgaagttcggcatatatttgcgggcataaatcagccctgccacaccaatcggaatattaatcaggaagatccagtgccagctagcccaggtcaccagtacgccgccgagaaccgggccaagtatcgggccgaccagccccggcatagtcacaaagttgagcaccgggagcagttcgctgcgcggataggcgcgtaataacgccagacgcgcgacgggcatcatcatcgcgccgcctatcccctgtagaacgcggaagataaccagttccgtcagagaggtggagagggcgcaagccagagaaccgagcgtgaacagcgtcaccgccagcatgaacactttgcgtgtgccgaaacgatcggccagccagccgctgaccggaataagcatcgccactgtcagggtgtagctgatgatggcggattgcatcgccagcggggagcggttaaggctttgggctatggcgggaagggcggtattgaggatagtggcatccagtgcctgcataaagaacgccatggctgcaatccacggcagtccggccatactgcgtgcttttttctctgtcatttatttacctgctggtgggttggcgcggccagcaacgcctggcacgcactcagggctcgctgcccgtcgctctcctgaatggcatcgactatcgcctgatgcagatccagcttcaccacctcatcctgcgtgatagaggtaaagtaagtgtggtacacagaatggaataaagaagcaaaggaggtcaggaaaggatttccgctcatattatagatatgttcatgccaggccatatcgaccgctatccagcgctcgcggttaaagtgctttttcagatccaccatctcttccatcaaagtattgagctgcgctttttgctctgctgtgccgagcgtggcggcaagcaggcaggcctgaggctcaagactgctgcgcatgaccagaaagtgatcgacgacctgattaaagttatcttcggtcatccaccaggtgagtaactcctgatcgagaaagttccagtttccctgaggcataacgcgggtgccaatgcgcggacgtggaagcaccatccctttcgccgttaatgtttttaccgcttcgcgaacggcggtacggctaacgccaaactgatctcccagctccatctcgctgggcaggatgctacctggagcatatttacccgctaagatcagctgcgccagtttctctgccagcacataggacaggtttttttgagctgccagctgttgtgcgcttaatggcatcgcttttattccttaaatattgatgcggttaattatgccatctcaggtgtgattgtggttgcagatacatcaaatagaacaatttgtagcttgaactcatcgcttttggtgaaaaaaaacacggtcagaaactttttttaaatttcctcttgtcacttcagaagaacccgcagcgacaaactttctggcgtatacgaacaccacattcttcatccgcatgcgctgctgacgcgtggtttcgatgacactttcctggccccgcattctcgctacgccgattttccggcacagctgatccgcgattacaccgacctggaaatcctggccgaaacggaagacggcgatgcctacctgttcgccagtaaagacaaacgcatcgcgttcgttaccggccatcctgagtacgatccgcataccctcgcctcagagtattttcgtgacgttgaagcgggtctgaatccggatgtcccgtacaactatttcccgaaaaatgatccgcaaaacacgcctcgggcaacctggcgtagccacggaaatttgctgtttaccaactggctcaactattacgtctaccagattacgccgtacgatctgcgccacatgaatccgacgctggagtaatcgtctgcattaaacgatcctaaagcgtttcagctattcagatcaggcacctttgggtgccttttttatttccgaaatccaactcaacatcgaagaaaactttaattccatattaatcatgcagttgtgattagatataaattaaaatggaaattgtttttgattttggaaaaattatagatagtcttaattctgctgagcgaaaactacacaacgatctttcgctcgcgtcgggggcgtgattttggatctttgatgaggagcagaacgatgactcaacaggcaacaacggtcgatgaactgacctttacccagccgaatggtgaacaagaacagcaagttttgacggcagaagcggtagagtttctgactgaactggtgactcgctttacgccacagcgtaataaactgctggcggcgcgcattcatcaacagcaggagatcgataacggcaagttgccagggtttatttcggaaaccgcttccattcgtcatggtgaatggaaaatccgcggaatccctgaagatttacaggatcgtcgcgtagagatcaccggtccggtagagcgcaaaatggtgatcaacgccatgaatgccaacgtcaaagtgtttatggcggacttcgaagattccctcgcgccggactggcagaaagttatcgacgggcagatcaacctgcgcgacgccgtcaacggcaccatcagctataccaacgaagtcggtaaaatttaccagctcaaaccgaatccggcggtgctgatctgtcgcgtacgcggtctgcatttgccagaaaaacacgtcacatggcgcggagaagcgattccgggcagcctgttcgactttgcgctgtacttcttccacaactataaaaacctgctggcgaaaggcagcggcccctatttctatctgccgaaaacccagtcctggcaggaagcggcgtggtggagtgaagtcttcagctacgcagaagaccgctttggcctgccgcgcggcaccattaaggccacgctgctgattgaaaccctgcctgccgtattccagatgcatgagatcctccatgcgctgcgtgaccatattgtgggcctgaactgcggccgttgggattacatcttcagctacatcaaaaccctgaaaaaccatgccgaccgggtattgccggatcgtcaggttgtcaccatggataaaccgttcctcagcgcctactcgcgcctgctgattaagacctgccacaaacgcggagcctttgcgatgggcggtatggcggcgtttatcccgagcaaagatgcagagcgtaacaatcaggtgctcaacaaggtgaaagccgataaagagctggaagcccgtaatggccacgacgggacgtggattgcccatcctggtctggccgatacggcgatggaagtctttaaccgcgtactcggcgacaacaaaaaccagctgtttgtcacccgtgaagacgatgcgccaatcgcagaagaacagttgctggcgccgtgtgcgggcgaacgcacggaagaggggatgcgcgccaacattcgcgtcgccgtgcagtacatcgaggcatggatctcaggcaacggctgcgtgccgatctacggactgatggaagatgccgccacggcggaaatttcacgtacctccatctggcagtggatccatcatcaaaaaacgctcagcaacagcaaaccggtaaccaaagccctgttccgtcagatgctggccgaagagatgcgggtcatccaggacgaactgggcgagcaccgcttcagcagtgggcgttttgacgatgccgcacgtctgatggagcaaatcaccacctctgatgacttaatcgacttcctgaccctgccgggctaccgcttcctggcgtaattcaccacataacaatatggagcatctgcacatgaaaacccgtacccaacagatcgaagagttacaaaaagagtggacccaaccgcgctgggaaggcattcgccgtccgtacagcgcagaggaagtggtgaaattacgcggctcggttaacccggaatgtacgctggcgcagaacggcgcggcgaaaatgtgggatctgctgcatggggggtctaaaaaaggctatatcaacagcctcggcgcgctgaccggcggtcaggcattgcagcaggcgaaggccggcattgaagctatctatctttccggctggcaggtcgcggcggatgctaacctggccgccagcatgtatccggatcaatctctttatccggcgaactcggtgccgtcagtggtggatcggatcaacaataccttccgccgtgcggatcagatccagtgggccgcgggtatcgaaccccacgatccgcgttttatcgactatttcctgccgatcgtcgccgatgcggaagccggtttcggcggcgtgctgaacgcctttgagctgatgaaatccatgattgaggccggtgcagcggccgttcactttgaagatcagctggcgtcggtgaagaagtgcgggcatatgggcgggaaagtgctggtgccaacccaggaagcgatccagaagctggttgccgcgcgtctggctgctgacgtgctcggcgtgccgacgctggtgattgcccgtaccgatgctgacgcggcggacctgatcacctctgactgcgacccgtatgacagcgaattcattaccggcgaacgtaccagcgaagggttctatcgcacacatgccggtattgaacaggcgatcagccgcggcctggcgtatgccccttacgccgacctggtctggtgtgaaacctccacgccggatctggcgctggcgaagcgctttgccgatgcgattcatgcgaagtatccgggcaagctgctggcctataactgttcgccgtccttcaactggcaaaagaatctggacgatacgaccatcgccagcttccagcagcaattgtcagatatgggctacaagtaccagttcatcaccctggcgggtatccacagcatgtggttcaacatgttcgacctggcgcacgcctacgcgcagggcgaaggcatgaaacactatgttgagaaggtgcagcagccagaatttgcggcgggcaaagaaggatataccttcgtttcgcaccagcaggaagtgggaaccggctacttcgataatgtgaccacgattattcagggcggggcctcctccgtcacggcattaacgggctcgacggaagaagcacagttctaatcttttccccctctcccccctcggggagagggttggggtgagggggaatatatgtcgcgtggtctggaattactgattgcccaaactattttgcagggcttcgatgcccagtatggccgctttctggaagtcacctccggcgcgcaacagcgttttgagcacgccgactggcatgcggttcagcaggccatgaagcagcgtatccatctttatgatcaccacgtaggtctggtggtggagcaactgcgctgtatcaccgacggtaaaagcccggatgcggaatttttactgcgcgtgaaagagcattacacccatctgttacccgactacccgcgcttcgagattgcggagagcttttttaactccgtctattgccggttatttgaccaccgctcattatctcctgagcggttatttatcttcagctcccagccggagcgccgcttccgtaccattccgcgtccgctggcgaaagatttctttcccgatcgcggctgggaaaagctcctgcaccgcgtcttaacggatttgccgctgcgcctgccgtgggagaataaaccccgggatatcggctatatccacgcatatctcagtgaaaccttcggcgaggcggtgctcagccgcagccatttgcaggttgccaacgagcttttctaccggaataaggccgcctggctggtgggcaaactggttacgccgacagctatcgtgccgtttctgctacccattcaccgtaccgacgacggcgaactgtttgtcgatacctgcctgactaccagcgctgaggccagcatcgtatttggcttcgcccgttcctatttcatggtctatgccccactgcctgccgccctggtggagtggctgcgcgagatcctgccgggcaaaaccaccgccgagctgtatatggcgattggctgtcagaagcatgccaaaacggaaagttatcgggaatacctgcgttatgtcaccacggctgatgagcagtttatcgaagcgccggggatccgcggcatggtgatgctggttttcacactgccgggcttcgaccgcgtgtttaaggtgattaaggataaatttgccccgcagaaagagatgaccgccgctcacgtccgcgcctgctatcagctggttaaagagcacgatcgcgtcgggcgaatggcggatacccaggagtttgaaaactttgtgctggataagcagcagatcgatccgtcgctgatgtcgctgctaatgcaggaagcgccgacgaaaattaccgatcttggcgataagattgcgattagccatctctatatcgaacgccggatggtgccgctaaatatctggctggagcagtccgaaggtcaggctttacgagacgccattgaagagtacggcaatgcgattcgccagctcgccgccgccaatattttccccggcgacatgctgtttaaaaacttcggcgtcacccgtcacgggcgggtggtgttctacgattacgatgaaatttgctacatgaccgaggtgaacttccgcgatatcccgccgccgcgctacccggaagatgaactatccagcgagccgtggtacagcgtatcgccgggcgatgtgtttccggaggagtttcgccactggctttgtgccgacccgcgcatcgggccgctattcgaagagatgcatgccgatctgttccgcgccagctactggcgcgggctgcaaacgcggataaaaaatgggcacgtggaagatgtctacgcttaccgccgcaagcagcggttttgcatccgcttttctccctctccctgtgggagagggccggggtgagggcatcaggcggcaatgcacgtttaacgaatcccaccatacgccagcgtcacctctttcgcggccttaatcaccatcgcgcccagctcggtgacgcggtcgtcggtcatgcgtgaaatcggcccggagatggagatggcggcaaacggctcgcggtgctcgtcaaaaatgcaggacgcgaggcagcgcagcccgagggcatgttcttcgtcatcaaacgaatagccgcgcttgcgggtcagagccagatcttctttcagatgcaccggcgacaccagcgtggcgtgggtataggcgtgcagccctttacggtgcagcagccccgttacctgctcttcgctcagctgcgagagaaacgctttccctgcgccagaggcgtgcatcggcaacttgccgccaatcggcgcggacatgcgcatcagctgcgtacactgcacctggtcgataataatcgcctggtgatcgctctgatccagcacggccaggtttaccgtctcgccggactcctccatcagcttgcgcagaatcgggtggacaatcgccagcaggttgcggctttgcaggaagctgctgccgacaataaacgcatgcgcccccaccgcccagtgtcccagctcgcccacctgacgcacgaagcccagctgctgcatggtggtcagcagacggtgcgtggtggagttcggcaggccagcctgctgcgccagctccgtcagggccacgctaccatgcgattcggctatccattccagcagcttcaggccgcgcgtcagggattgaacctgtccgcctggttgtgcagcggtggttgcagcaggttttctgccgcgtttagcgggaacggtcgtaaccatgacgaactcctttttctgtatcgtggaaatcattttcgttttatttggtggttttgcaaccgctttcctgactgatcggaggagtgatagtgaacatgtctcatgttaccgctgtgtgacttttcgaccctgcgagattatgccagtatggaacgcagccttttggccatgttgagcgttgtcgggagcaagtgtgagcagcaaagtagagcaactgcgtgcgcagttaaatgaacgaattctggtgctggacggcggcatgggcaccatgatccagggctatcgtctgagtgaagacgatttccgcggcgagcgctttgccgactggccttgtgacctgaaagggaacaatgacctgctggtgttaagcaaaccgtctgttatcagggatatccacaacgcttacttcgaagcgggtgcggatattgttgaaaccaacaccttcaactcgacaaccatcgccatggcggattaccagatggaatccctgtcggcggagatcaactttgaagcggcgaagctggcgcgcgcctgcgccgacgaatggacggcccgtacgccggacaagccgcgctacgtagccggggtgctgggtccaaccaaccgcaccgcgtcgatttctccggacgtcaacgacccggcgtttcggaacatcacctttgaccagctggtggccgcgtatcgtgagtccactaaagcgctggtggaaggcggctccgacctgatcctgattgaaaccgtattcgacaccctcaacgctaaagccgcgatttacgcggtgaaagaggagttcgaggcgctgggcgtcgacctgccgatcatgatttccggcaccatcaccgacgcctcggggcgcacactttccggccagacaaccgaagcgttttataactccctgcgccacgccgaagcgctctccttcggcctgaactgcgcgctggggccggacgaactgcgccagtacgtgcaggagctttcgcgcatcgcagagtgctacgtcaccgcccacccgaacgccggtctgccgaacgcgttcggtgagtacgatctggatgccgacaccatggcggcgcaaatccgcgaatgggccgaatctggcttcctcaacatcgtcggcggctgctgcggcaccacgccggagcatatcgccgccatgagccgcgccgtcgccgggcttgcaccgcgcaagctacccgagcttccggtagcctgtcgtctgtccggcctggagccgttgaccatcggcgacgacagcctgtttgtgaacgtgggtgaacgtactaacgttaccggttctgcgaagttcaagcgcctgatcaaagaagagaagtacagcgaagcgctggacgttgcccgccagcaggtggaaagcggcgcgcagattatcgatatcaacatggacgaggggatgctcgacgccgaagcggcaatggtgcgtttcctcaatctgattgccggtgagccggatatcgcccgcgtgccgatcatgattgactcttccaaatgggaagtcgtcgaaaaagggctgaagtgcattcagggcaaaggcatcgttaactccatctcgatgaaagagggcgtcgatacctttatccaccacgcgaagctggtccgtcgctacggagccgccgtggtggtgatggccttcgatgaagtgggccaggccgatacccgcgagcgcaagattgagatttgccgccgcgcgtacaaaattttgaccgaagaggtgggcttcccgccggaagacatcatcttcgacccgaacatcttcgccgtcgcgaccggcatcgaagagcacaacaactacgcccaggactttatcggcgcgtgtgaagacattaaacgcgagctaccgcatgcgctgatctccggcggcgtgtcaaacgtgtcgttctcgttccgcggcaacgacccggtgcgtgaggcgatccacgccgtattcctctactacgccatccgcaacgggatggacatggggatcgtcaacgccggccagctggcaatttacgacgatctgccagccgagctgcgcgacgccgtagaagacgtgatcctcaatcgtcgtgacgacgccaccgaacgcatgctggatctggcggaaaaataccgcggcagtaaatctgacgaatcagccaacgttcaacaggccgaatggcgctcctgggatgtgaataagcgtctggaatactcgctggtaaaaggcattaccgagtttatcgagcaggataccgaggaagcgcgtcagcaggccgcccgtccgattgaagtgatcgaagggccgctgatggacggcatgaacgtggtcggcgatctgttcggcgagggcaaaatgttcctgccgcaggtggtgaaatccgcccgcgtcatgaagcaggcagtggcgtatctggaaccctttatcgaagccagcaaagagaagggctccagtaacggtaaaatggtcatcgccaccgtgaagggcgacgtacacgacatcggcaaaaacatcgttggcgtggtgttgcagtgtaataactacgaaattatcgatcttggcgtgatggtcccggcggataaaatcctcaggaccgcgcgcgaagtgaatgcggatctgattggtctttccgggctgattacgccttcgcttgacgaaatggtcaacgtggcaaaagagatggagcgccagggctttaccattccgctgctgattggcggggcaaccacctcgaaagcccacacggcggtgaaaatcgagcagaactacagtgggccgacggtgtatgtccaaaacgcctcgcgcaccgtgggcgtggtctccgcgctgctgtccgacacccagcgcgatgattttgtcgcccgcacccgcaaagagtatgaaaccgtccgcattcagcatggacgtaagaaaccgcgcacgccgccggtttcgcttcaggcggcgcgcgataacgatctggcgttcgactggtccagctatacgccgccggtcgcacaccgtctgggcgtgcaggacgtgacggccagcatcgaaacgctgcgtaactacatcgactggacgccgttcttcatgacctggtcgctggcgggcaaatatccgcgcattcttgaagatgaggtggtgggcgaagaggcgaagcgcctgtttaaagatgctaacgacatgctcgacaggctgagcgcagagaaagccctcaacccgcgcggcgtggtggggctgttcccggcgaaccgcgtgggcgacgacgtggaaatctaccgcgatgaaacccgcacccacgtgctggccgtgagccaccacctgcgccagcaaaccgagaaagtgggctttgccaactactgcctggcggatttcgtcgcaccgaaactctccggtaaagccgactatatcggcgcctttgccgtaaccggtggtctggaagaagacgcgctggcggatgcgtacgacgcgcagcacgatgattacaacaaaatcatggtgaaagcgatcgccgaccgtctggcggaagccttcgctgaatatctgcatgaacgcgtacgtaaggtgcactggggctacgcggcgaatgagaacctcagcaacgaggagctgatccgcgaaaactaccagggcattcgtccggcgccggggtatccggcctgcccggaacacatcgagaagggcactatctggaagttgctggacgtcgaagcgcataccggcatgaagctcaccgagtcgttcgccatgtggccgggcgcgtccgtttccggctggtacttcagccatccggacagcaagtacttcgccgtggcacagcttcagcgcgatcagattgaggattacgccctgcgtaaaggcatgagcgtgtcagaggtggaacgctggctggcgccgaatttgggctacgacgcagactaacgtcacttttccttacaacaaacagggcaccgctatggtgccttgtctctttcttacgtttaaacccttatactgaacctcaggaaagcgaataacgataaggaggaatgcctaccgtgttgacgttgttacacctgctctccgcagtcgcactgctggtatggggcacccatatcgttcgtaccggcgtgatgcgcgtgtttggcgcacgtttacgtaccgttctcagcggcagcgttgagaagaagccgctcgccttctgcgcgggtattggcgtcacggcgctggtgcaaagcagcaacgccaccaccatgctcgtcacctcgttcgtggcgcaggatctggtggcgctcgccccggcgctggtgattgtccttggcgccgacgtcggtaccgcgctgatggcgcgtatcctgacgttcgatctctcctggctgtcgccactgctgatttttatcggcgtcatttttttcctcggccgtaagcaaagccgtgccgggcagcttggccgcgtcggtattggcctcgggctgatcctgctggcactggagctgattgtgcaggctgtcacgccgatcacccaggccaacggtgtgcaggtcattttcgcctcgttaaccggcgatattatgctggatgcgctgatcggcgcggtattcgccatcgtcagctactccagcctggcagcggtcctgctgacggcgaccttaaccgccgcaggggtaatttccttcccggtggcgctgtgcctggtgatcggtgccaacctcggctctggcctgctggcgatgctcaacaacagcgccgccaacgctgccgcccgccgagtggcgctggggagtttactgtttaagctggtgggtagcctgatcattctgccgtttgtgcacccgctggcgaacctgatggataatctctctctgccgaaagcggagctggtgatctacttccacgtcttctacaacctggtgcgctgtctggcaatggtgccgtttgccgcgccgatggcccgcttctgcgagcggcttattcgtgatgaaccggagctggacgcgcgccttaaaccgaagcatctggacacctcggtgctggatactcctgcgctggcaatcgccaatgccgcccgcgaaacgctgcgcatgggcgacgcgatggaaaccatgctggaagggctgcaaaaggtgatgcacggcgagccgcgcgaagagaaagagctgcgcaggctggcggacgatatcaacgtgctctataccgccatcaagctctatctggcgaggatcccccaggacgagctggcggaagaggagtcgcgccgctgggcggaaatcatcgagatgtcgcttaacctggagcaggcttcggatattgtcgagcgtatgggcagtgaaatcgcagacaaatccctggccgcacgccgggcgttttctgttgaagggctgaaagagctggaagcgctgcacgaacagctggtcagcaacctgaagctggcgatgtcggtcttcttctccagcgacgtgccgagcgcgcgccgcctgcgccgcaataagcatcgtttccgcatccttaatcgccgctactcacacgcccacgttgagcgtctgcaccagcagaacgtgcagagtatcgagaccagctcactccacctggggctgctgggggatatgaagcgcctgaactcgttgttctgtgcggtggcgtacagcgtgatggagcagccggatgaagacgatgagcgggatgagtattaatccccagagggtttgattgttaacccaaggcccaatgctttcatgaccgccagcgtggttttgagcgttgggttccccttatcactgaatgatcgatacagttgttctcgtgacaggcccgtttgctgggaaatggtcgacatccctttcgctcgggcgatgacgcccagcgctttagcaatgtacgctgagtcacccgtctctaatgcatcagccataaacacagcgatttcctcgtcatccagcagtgcgttggctggatcgtagggtgttaatttatgcatgctcattcactcctgccattgggatacattgctcagcatttttgccataagtatgtctctggcctggctgcttttgtcaccaccacataacagcacgatgatgctattgccctggtccttaaaatagatcctgtagcccgggccaaagtggatcctcagttcactgataccttcccccacgggtctaatgtcgcccgctaagccatttgccagcctaaagaggcgggaagcgataatcgtctttgcccgcctgtcctttaaattttgctcccagcgtcggaaggattctgtctgaacgatctccttcatattactccctgtgatttataaactacaagcaattgtctctggagagtaaagctaaaaggagttagcccaaggataaatagcctgacgctaaatcctgaaagcgtctcgcaaactaaaaaacccgtctcagttaccgtcggctaatctttttttccagcccaaacctaaggtatatttcgcccttcacaggagaaactatgctgccaactcaatcaacccgattaaacaaatacattagcgagagcgggatctgctcacgtcgcgaggctgaccgttacattgaacagggtaacgtgtttcttaacggcaaacgcgccaccattggcgatcaggtagtgcctggcgatgtggtgaaagtgaatggtcaggtcatcgaaccgcgtgatgccgaagacctggtgtttatcgcgttgaacaagccggttgggattgtcagcactacggaagatggcgagcgggacaacatcgttgatttcgtgaaccacagcagccgtattttcccgattggccgtctggataaagactctcaggggctgattttccttaccaaccacggtgacctggtcaacaaaattctgcgtgccggtaacgaccacgagaaagagtacattgttacggtgaacaagccggtcacggacgagttcatccggggaatgggcgcaggtgtgccgattctgggcaccgtgacgaagaagtgtaaagtcagaaaagaggcgccgtttgcgtttcgtatcacgctggtgcagggcctgaatcgccagatccgccgcatgtgcgagtacttcggttatgaagtgacgaagctggaacgcacgcgcatcatgaacgtcagcctgtccgggatcccgctgggcgagtggcgtgacttaacggatgacgagctgatcgagctgttcaaacttatcgagaactcctcgtccgaagcgaagccgaaagctaaagccaaaccgaaaacgcaggcgattaagcgtccggtggtgaaggcaccgcaggcggaagagaaagggcggggcaagccgggcaacggaaaacgctttacccagccggggcgcaaaaagaaagggcgctgattagcgccttccacgggttgatgtgctggcggaccaggaaaaagtcgcctctgcatcgggtttataagcctgctcttttttcagcttgcgggcttttttcgccgcggcatcacgttgcgccatcagtttatcgatgtactcttttttaacctgattggtttcggcgttcgtcagcgtgcggccatgcgcgatgcgggcgcggtcgagaagcgttttcagttcgcgctgctcggcttcggtcatgtctttctgggtcaaacgtggtgtagccattgctgaagcctcctgatggggaggcttcagtgtaaagcaagccgggtcaattaaccctgtttcaccgcatcttttttcggttggtcatcaatcggcttaccggaccagtatcctgctaacagcgaaccggacaggttgtgccagacggagaacagcgcccccggtagcgctgccagcggtgagaagtaaattttacccagcgccgccgccaggccggagttctgcatccccacttcgatcgccagcgtgcggcaggtggattcgtcaaagccaaacagctttccgccccagtaaccgcccagcagaccaatagtgttatgcagcacaaccgcgacgatcaccacaaagcccaccgaagcaatgtgcgatgcggaaccggctaccacggcgctgataatggccagtatgcagaccatcgaaaacgcgggcagatacggctcaaccgctttcactacccgcgggaagagatggtggatcaccagccccagcgcaatcgggatcaccacgatttgcaggatgctgagcagcatgcccatcacgtccacctggatatgcgcgtccacatacaggcgggttaacagcggcgtggcaatcacgcccaccagcgtggaaacggacgagatggtgacggagagcgccacgtcgcctttcgccagatagatcatgacgttagatgccgtaccgctggcgacgctccccaccagcaccatcccggcggaaaggtcgggcggcatcttaaaggccatcgccagcagccaggccgcgagcggcatcaccaggtagtgcaggaaaatccctgcggcaaccggtgccgggcgagacagcacgcgtttgaaatcatcaattttcagatgcacgcccatgccgaacataatcagcatcagcagcgtggtgacccacggaccaatgcccgtgaacgtggcaggagtgtaatacgcgagtacagagagcagcagcgcccataacgggaacagccgggtgatagcggagagcatagtgaattccttgcagtattgtcgtgttgttttgttataaaaaagccgggtctgtgcccggcttattgatattgtttatcgtgctaacgaattttattcaaacaaattctgatgaagtttctgcacgacctgctcggcctgatcggcagggaccaggaagcagaggttgtagctggacgcgccgtagcaaatcatgcggatattgaacgggtcgagcacgccgaacacctctttgcccacgccgcacgcgcgcgacagcttattaccgatgatggcaaccagcgccagatcttcttccacctccacgcggcacaactcggaaagctcaatcagcagcgactgcgtcagcagggtgtcgccggtagaggtggagccggtggtgtcgagcgtcagcgcgatgctgacttctgacgtggtgatcaggtccacggagatattgtggcgcgccaggatgccaaacacttccgccagaaatccacgggagtgcagcatattatggctgtgcagggtaaccagcgtctgcttacgacgcagggccagcgcgcggaacagcggtgggttctcggttttcttgcagaccagcgtcccgcccgcctttggatctttactggagccaacgaagaccggaatgtcgctgcgcacggcgggcagcagcgtggccgggtgcagcactttcgcgccgaaagtcgccatttcagccgcttcttcaaaggcgatcacgtcaatacgttttgccgcagagaccacgcgtgggtcggtggtgtagatacccggcacgtccgtccagatatccacgcgggtggcgtgcagggcttcacccagcagggcggcggtgtagtcgctgccgccacggcccagcgtggttgtgcgccctttggcttcgctgccgataaagccctgggtgatcactatgccttcatccaggcgcggggcaagctgctggttagtcagctcagccagggcttccacgtccggctcggcgcggccaaagcggtcgctggtgcgcatcactttacgcacgtcgaaccactgcgcctgaatattgcgctcgcgcatgatctcaacgaacagcagtgtggacatcagttcgccgtggctgaccagttcatcggtcagtgcgctggaggtggccagcgacgcggcttctgccagggtggtgatattttccagcaggcgttccacttcctcacgaatgacgttcgggttttgcagacgctcgagaatgtcgaactgaattttgcgcagtgcatccagcttcacgaaacgctcggtcgcttccagtccttcagacagggaaaccagcaggttcgtcacgccggctgaggcggaaagcaccaccaggcgggtattcggatcggccagcaccacatcggcgctgcggttcatggcatcgtagtctgccacactggtgccgccaaacttggcgaccacaaaactcgtcataacaacctcgtgtcagggaatgaatagagcgaccttggcacaagaatgaagcgagaacaggtgcaggcgcaaaatacggccctataaataaaatgcgagggaggtcctgtcaatgctgggattatgcggatttttcatgggggggtacccctcagaaacaggacttataacaggcccatattttatgctcctttttccccctttttgaccaacatttcgccacgccggaagggcgcgacagcagctatacttttcgggtcttttcacctgcgtttgatgcagaccagggcaatggcataaaaaccatcacaatttttatttgcaggcgctacaatcgaccgcagtcacaattctcaaatcagaagagtattgctatgaaaaacatcaacccaacgcagaccgctgcatggcaggcactacagaaacattttgatgaaatgaaagacgtcactatcgcggatctgttcgcgaaagatgccgatcgtttcagcaagttttccgccaccttcgatgacctgatgctggtggatttctccaagaaccgtatcaccgaagagacgctggcgaagctgcaagatctggcgaaagagactgagctggcagatgccatcaaatccatgttctccggtgagaaaatcaaccgcaccgaagaccgtgccgtcctgcacgtggccctgcgtaaccgtagcaatacgccaattatcgttgacggcaaagatgtgatgccggaagtgaacgcggtgctggaaaagatgaaaaccttctctgaagcgatcatctcaggtagctggaaaggctacaccggcaaagcgatcaccgacgtcgtaaacatcggtatcggcggctctgacctcggcccgttcatggtgaccgaggcgctgcgcccgtacaaaaaccacctcaacatgcacttcgtgtccaacgtcgatgggactcacatcgctgaagtgctgaaaaaggtgaacccggaaaccacgctgttcctggtggcgtctaaaaccttcaccactcaggaaaccatgaccaacgcccacagcgcgcgcgactggttcctgaaaaccgcgggcgacgaaaagcacgtggcgaaacactttgcggcgctgtccaccaacggtaaagcggtgggtgagttcggtattgataccgcgaacatgtttgagttctgggactgggtgggcggccgctactcactgtggtctgcgatcggtctgtccatcatcctgtccgtgggcttcgacaacttcgttgaactgctctccggcgcgcacgcgatggacaaacacttctccaccaccgcgcctgagaaaaacctgccggtgctgctggcgctgatcgggatctggtacaacaacttcttcggcgctgagaccgaagcgattctgccgtacgaccagtacatgcaccgctttgcggcctacttccagcagggcaacatggaatccaacggcaagtacgttgaccgtaacggcaacgcggtggattaccagactggcccaatcatctggggcgagccgggcaccaacggtcagcacgcgttctaccagctgatccaccagggcaccaaaatggtaccgtgcgatttcatcgccccggcgatcacgcacaacccgctgtccgaccaccatccgaagctgctgtctaacttcttcgcccagaccgaagcgctggcgttcggtaaatctcgcgaggtggttgagcaggaataccgtgaccagggtaaagatccggctacgctggagcacgttgtgccgtttaaagtgttcgaaggcaaccgtccaactaactccattctgctgcgcgaaatcacgccgttcagcctgggtgcgctgattgccctctacgagcacaaaatcttcactcagggcgctattctgaacatctttacctttgaccagtggggcgttgagctgggcaaacagctggcaaaccgcattctgccagagctgggtgacgataaagcgatcgacagccacgacagctccaccaatggtctgattaaccgttataaagcctggcgtgcgtaataaatatgtcatgaacaatgccggcgatatgccggcatttttttatcggataattcctgatgtctgttagttatctcaaattctgaatctgagtttaatccgaaaaagacggtaaccccgttaattgctgaggtttattttaagaaaatacggagtgatattttaatgttcttatattataacttgttgatttatagtgattatatatttccttgattcttttttccttccatttttaaccattagtctgaaaacctcatccctatttacccccacggtaaacccactgctttagttgtgtatactcgaatccgcctgaatttcttttcgggcaaatctccattcattcattgaagggaaattgttatgaagaaagtactgtatggcatttttgccatatctgcgcttgcggcgacgtctgtctatgcagctccggtccaggtcggggaagcagcagggtcggcagcgacgtctgcgtctgcggggagttctaccgcagccagcaccagcgccgtaagttcagccgtgggtgtcgcgctggcggcaaccggtggcggtgatggctccaataccggaaccacgaccactacgacgaccagcacccagtaataacgggtgttttaatcataaccacacttcggtgtggttatttcgccccttcggagaagagtcgtgaagcgacctgcaatcatcctgatttgcctgctgttgcaggcgtgctcagctaccaccaaagggctgggccactcactgtgggacagcatgttcggcacgccgggcgtgcatctgaccgatgacgaacttcagaacatgccgtatgccagccagtacatgcagctaaacgatggtccgcaactgtttgtggtgctcgctttcgatgaaaacgggcagcagaaatgggtgacgcaggatcaggccaccatcgtgacgcagcattcccgcatcgtgaaaacgttgctcggcggcgacaacctgcttgaggtgaacaacctggctgaagatccgctcatcaagccgaatcagatcgtcgatggcgcaagctggacgcgcacgatgggctggaccgagcataaacaggtgcgctacgccacggcccgctccaccttccgctgggacggtacggacagtgtcaaagtgggcagcgacgaaacgcaggtgcgcgtgctggatgaagaagtgacaaccgatcaggccacctggcataaccgcttctgggtggacgaagaggggcaaatccgccagtccttacagtatctcggtgccggtttcttcccggtgaagaccaccctgatcaaggcggcgaaatcatgaaaatgttcatccacattgcgcttctcgccagcctgacctcgccgctggcgtggtctgcgggaacggtacaggtctacaccccggacagcgaaaaacctaaaaccttaaccaatgccgggcatctgctcgatctggtggggcagccgaggctggcgaaaagctggtggaccggggcggtgatcagcgagcgtcaggcgacgatcgtagcggaacaaaaacatcaggcgctgctcgcccgactgagcgggctggcacaacaggaagataccgacgatgccgcggccattactagcctgcgtcaacagcttcaggcggttaaggtgacggggcgccagaaggtgaatctggatccggatgaggtgcgcgttgcggaaaacggcaatccgtcgctggaaggggactataccctgtggcttccggctcaaccttccaccgtcaccgtgatggggcttctcagcagccctggcaaaaagccgtttacgccgggccgggacgtggcgagctatctcgacgagcaaagtctgctcagcggagcggataacagctatgcctgggtggtctatccggacgggcatacgcagaaagcgccggtggcttactggaataaacgccatatcgaacctatgccaggcagcatcatttttgtcggttttgccgaccatttctggacgaaagcgtatgacgggcttaatgccgatatccttcgctccctgatacagcggataccggaataatgaaaaaaacctatctctacagcatgcttgcactgtgcgtgagtgccgcctgtcatgcagaaacgtatccggcacccatcggcccgtcgcagtccgattttggcggcgtgggcttactgcaaaccccaaccgcgcgtatggcccgcgagggggaaatcagccttaactatcgcgataacgatcagtaccgttactactctgcgtccgtgcagctgttcccctggctggagaccacgctgcgctacaccgacgtgcgtacaaaacagtacagcagcgtggatgccttctccggcgaccagacttataaagacaaagctttcgacgtgaagctgcgcctgtgggaagagagctactggatgccgcaggtctccgttggtgcgaaggatatcggcgggaccggcctgtttgacgcggaatacatcgtggccagcaaagcctggggaccgtttgatttctcactcggtctgggatggggctatctcggcaccagcggcaacgtcaaaaatccgttctgtacctacagcgataaatactgctaccgcgataacagctaccagaaagcgggctccatcaacggggaccagatgttccacggcccggcctcgctgtttggtggcgtggagtatcaaacaccgtggcagccgttacgcctgaagctggagtacgaaggaaacgactactcgcaggacttcgccgggaaaattgagcaaaagagcaagtttaacgtcggcgccatttaccgcgtcaccgactgggccgacgttaacctcagctatgagcgcggtaataccctgatgtttggctttaccctgcgcactaactttaacgacatgcggccgcactacaatgacaacccgcggccaaaatatcagccggagccgcaggatgcgatcattcagcactccgtggtagcgaaccagctgacgctgctgaaatataacgcgggcctggcggatccaaagatccagaccaaaggcgatacgctgtacgtcaccggcgagcaggtaaaataccgcgactcccgcgaagggatcgagcgcgccaaccggatcgtcatgaacgatctgccggaggggatccgcacgatccgcgtgacggagaaccgcctcaacctgccgcaggtcacaaccgaaaccgatgttgccagccttaagcgtcatcttgaaggcgaaccgctgggacatgaaaccgagctggtacaaaaacgcgttgagccggtggtgccagagagcaccgagcagggctggtatatcgataaatcccgcttcgatttccatatcgatccggtgctgaaccagtccgtgggtgggccggaaaacttctacatgtatcagctgggggcgatggcgacggcggatctgtgggtgaccgaccacctgttgaccaccggtagtctgttcggcaacattgctaacaactacgacaaatttaactacaccaacccgccgaacgattcaaaactgccgcgcgtgcgtacccgcgttcgcgaatatgtgcagaacgatatctacgtgaataacctccaggccaactacttccagtacttcggcaacggcttctacggccaggtttacggtggctatctggaaaccatgttcggcggcgccggggcagaagtgctttatcgtcctgtcgacagcaactgggcgtttggggttgatgccaactacgtgaaacagcgtgactggcgcagcgcgcaggacatgatgaagttcaccgactacagcgtcaaaaccggccacctgaccgcctactggacgccgtcgttcgcgcaggacgtgctggtgaaagccagcgtcggccagtatctggcgggtgataagggcggcacgctggatatctccagacacttcgacagcggcgtggtggtgggcggctatgccaccatcaccaacgtttcgccagacgagtacggggaaggggacttcaccaaaggggtgtacgtgtcgattccgctggatctgttctcatcaggcccaacccgcagccgtgcggcagtgggctggacgccgctgacgcgcgacggcggtcagcagcttggacgtaaattccagctgtatgatatgaccagcgataagaacattaacttccgctgatgcttatttgcccggtggcgctgcgcttaccgggcctacgagagtgtttttgtaggccgggcaaacgcagtgccgcccggcaagaatgttcatctggacaaaacataaacaaaaaatatagatccccgtcacatttttgcgttatacaggaacctcgccctggagaatgaggtgctgtatgacatccctgactcgtccgcgcgttgagtttatctcaacgatactccagaccgtgctgaacctcggtctgctgagccttggcctgatcctggtcgtttttctgggtaaagagacggtgcatctggcggatgtgctgttcgcccctgagcaaaccagcaaatacgcgctggtggaaggcctggtggtctactttctctactttgaatttatcgccctgattgtgaagtactttcagtccggctttcacttcccgctgcgctattttgtctacattggcatcaccgccattgtgcggctgatcatcgtcgatcataaatccccgctcgacgtgctgatctactcggcggcgatcctgctgctggtgatcaccctctggctgtgcaactcgaagcggctgaaacgcgaataaaaaaaatggcggcccggaggccgccgaataacagtcacaagttggttcaatacaatacgtctaaagttgagggttgcagtggcataacaaatgaaacttaacctttcacaccgcccgccgtcaggccgttgaccagccagcgctgggccagcaggaacaccacggtaatcgggatggcagagaggacggccgccgcggcaaagtcgccccacaggtagttttgcgggttgaggtactgctgcataccgacggcaagggtgtagctgttcacatcgcgcagtagcagtgaggcgaccgggacttcggtgatggcggcgataaacgacaggataaacaccaccgccagaatcggcaccgacagcggcagcagcaccagacggaacgcctgccacggtgtcgccccatccagcgccgccgcttcttccagcgagccgtcgatggtttcgaaatagcccttgatagtccacacatgaagggcgatgccgccaagataggcgaagatcacgccgccgtgagtgttcaggccgatgaacggcacatactgcccaagacggtcaaacagggcatacaacgccaccagcgacagcacggccgggaacatctggaaaatcagcatccctttcagcagcgtcgctttgcccgggaaacgcatacgggcgaaggcgtaagcgcaggtggtggagagcgtcacgatgccgatcgcagtgatggtcgccaccttcaccgagttccatagccacagcagcaccgggaacggcggcggcgtgacgcggccatccgcatgttccacgctgaagcccagcgcgagcttccagtgctcccaggagatttcgtccgggatcaggctcccggtggcgaagttccccgagcgcagggagatggcgataaccatcagcagcgggaacatgatcgccgcgatgaaaatcagcaggcctaagtgcgtcgcgaggaggcgcagtttctgagatttgggttgtaccattgccatgttcagtgccctccttagtcaaatttcatacgtgtggctttcaggttcacaatcgccagggcgcccactagcaggaagatcagggtggcaatcgccgccgccaggccgaagtcctgaccgccgccgccctcgaaggcgatgcggtaggtgtagctcacgagcaggtcggtatagcctgccggcgtggtggtgccgagacggtccgggccaccgttggtcaacagctgaatcagcacgaagttgttaaagttaaaggcgaagctggcgatcatcagcggcgtaagcggcttaatgagcagcggcagggtaattttgaagaagttctggaacgggcccgcgccgtccatcgccgaggcttcgtacagatcgtccgggatagccttcagcagccccatgcacaggatcatcatgtacggataaccgagccaggtgttcacgatgataatcatcgagcgagcggtggttgggtcgctgaaccaggccggtttgataccgaacagcgcgctcagcatcatgttgatttcaccgaagctctggttaaacagccctttgaaaatcagaatcgagataaacgacggcacggcgtagggcagaatcagcagcacgcggtaaatcgctttgcctttcagggactcccactgcacgaggcaggccagcaccatgcccacggccacggtcaggatcacggttagcaccgagaagaccaccgtccagacgaagatggcgaagaacggtttctggatgccttcgtcggtaaatacgcgggtgaagttgtcccagccgatggtgacggtatagcccgggctgagtttgtcgtcgccccagctgccgtcggcattcaccgactgatagaaaccgatatcgttgttcggacggtacttcacgccgctctggttgttggtcagcgtgccgtcatccgccagagtataaagcggctgcgtgccggagaactggcgcagcgagctcatggttactttgctgtcatcgggcagcacggcggtgagctgggtcagcgcctgacgattctgggtaatgatacgcaggttcgcacgttcaccttccggcagggccgcagcctcttttaaggccagcttctgctcgccgccaaatttgaacgcgtcggaaagataggttttgccgctctcaccgtcagtgagcgctaacttccactcgtcacccgtgggatacaggccgaagttaaaggttttacccgcctggtaagaacgatccagaagcacctgggtggcacgctcctgcgcgagctggttggtgctgctgtagttggtaaaggcaatcgcgatggtgcagatcagcggaaagaggacaaacagccccatcccggcaacgcccgggtagacatagcgccaggcgtacgctttacggttggcgaaaatatacaggccaaccgagcttaaaatcagcgtcatgatggcaaacaggtattccccttgcacgtacattaaaacaacaaggtaacccaccagcagacacagcagacctatcactgaccacttcagtgcgtcgctttgccaccagtgtttctttttaatgacatccatggggttcttcctctacaacggtggaaacttatcgtcaggtggcgctgcgcttacctgacctacggatcgtgccgtagtcgtagggcgggtaagcgcacgcgccacccgccgtttttcagacttacttagtaatacggccctgagcatctttcagtgcggcatcgacagtctggcgaccgcttgcagcgttgatgaccgcggtacgggtggcgtaccagaacgcagccatctgtgggatgttcggcatgatttcgcctttctgggcgttatccatggtggccgcaatacgcggatctttcgccagctgatcctggaaggatttcagcgcaacggcgcccagcggcttgtccttgttcacttcatccagaccctgatcggtcagcaggtagttttcgaggaactctttcgccagctctttgttcgggctggcggcgttgatacccgcgctcagcacgccaacgaacggtttagacggcttgccgttgaaggttggcagcagggtcacgccgtagttgattttgctcttgtcgatgttggtccaggcccacggaccattgatggtcatcgcggtttcgcctttgttgaacgccgcttccgcgatggagtagtcggtatccgcattcatgtgtttgttcttgatgaggtcaaccaggaaggtcagacccgctttcgcacctgcgttgtccacgcccacgtctttcacgtcatatttgccgttttcaaacttgaacgcgtaaccgccgtcggcagcaatcagcggccaggtgaagtacggctcttgcaggttgaacatcagggcggatttacctttcgccttcagctctttatccagagcagggatctcttcccaggtcttcggcgggtttggcaccaggtctttgttgtaaatcagagacagcgcttcaaccgcgattgggtaagcgatcagcttgccgttatagcgaacggcatcccaggtgaacgggaacagtttgtcctggaaggctttgtctggcgtaacttctgccagcaggccagactgcgcgtagcccccgaaacggtcatgcgcccagaagataatgtccggaccatcgccagttgccgcaacctgcgggaacttctcttccagtttgtccgggtgttcaacggtgactttgataccggtgtctttctcgaattttttgcccacttcggccagaccgttatagcccttgtcgccgttaatccagataaccagcttaccttcttcaattttggcgagagccggtgcggaaatcatcattgctgcgagggcggacaatgcgaaaacgcgtgcgccagtcttgatcttcatatctgccatcctttattggtgatgtgctcgtggatacataaggtggttcaacgtgactcagtctccttatttgacatcctctttccatcctcccagtccctacgccccaccccctgtttgtgtgatccctgtaacataaatttaagttatgagtgctggcgcacataaaaacccactgaattttgcaggccgcttcacgattttcgcctcagcccctccgctgcggtcgcagagcctgctctctcatcctcccgcctcctcccccataaaaaagccggggggtggaggattcacgaaagtaatggaacacgcatagtgaacttatcttgaatgtttctgtcggtgacaggttgtaacgaagggagaagggcatggcgagcgtacagctgcgtaatgtaacgaaagcctggggcgacgtagtggtgtcaaaagacatcaatctggacatccacgaaggtgagtttgtggtgttcgtgggtccatcaggctgtggtaaatcgactctgctgcgtatgattgccggtcttgaaaccatcaccagtggcgatttatttattggtgatacccgaatgaacgacatcccgccagctgaacgcggcgtgggcatggtgttccagtcttatgccctttatccgcatctttccgttgccgagaacatgtcctttggcctgaagctggccggcgcgaaaaaagagaccattaaccagcgcgtcacccaggtggcggaagtgctccagctggcacatctgctggagcgtaaaccgaaggcgctctccggtggtcagcgtcagcgtgtggcgatcggccgtacgctggtggccgagccgcgcgtgttcctgctcgatgaaccgctttctaacctggatgccgccctgcgcgtccagatgcgtatcgaaatctcccgtctgcacaaacgccttggacgcacgatgatttacgtcacccacgatcaggtcgaagcgatgacgctggccgacaaaatcgtggtgctggacgccggtcgcgtggcgcaggtgggcaaaccgctggagctgtatcactacccggcagaccgctttgttgcgggcttcattggctcgccaaagatgaacttcctgcccgtaaaagtgaccgcgacggcaatcgaacaggtacaggtggagctgccaaaccgtcagcaagtctggctgccggtcgacagcgctaacgtacaggtgggggccaacatgtccctcggtatccgccctgagcatttactgccgagccacatcgctgatgtgacgctggaaggtgaagttcaggtcgtcgaacagcttggtcacgaaacacagattcatatccagatccccgccatccgtcagaacctggtctaccgccagaatgacgtggtgttggtagaagagggtgccacattcgctatcggtttgccgccagagcgttgccatctgttccgtgaggatggcactgcatgtcgtcggttgcacaaagagccaggcgtttaagcattccaattacaaagaaaagcaatgatctcaggagatagaataatgattactctgcgcaaagtccctctggctgtcgccattgcggcaggcatcctgtctgcccaggcgggcgccgtagactttaaaggttatgctcgttccggcattggctggaccggaagtggcggtgaacaacaatgtttccaggcaacaggcgcacaaagtaaataccgtctcggtaacgaatgtgaaacctacgccgaactgaaactgggccaggaagtgtggaaagaaggcgacaaaagcttctatttcgacaccaacgtagcgtactccgtttctcaacagaatgactgggaatccaccagcccggccttccgtgaagctaacgtgcaggggaaaaacctgattgaatggctgccaggctctaccatctgggccggtaaacgcttctatcagcgtcatgacgtacacatgatcgacttctactactgggatatctctggtcctggtgccggtattgaaaacatcgatctgggctttggtaaactttctctggcagcgacccgttcttctgagtccggcggttctgcaaccttcgccgatcgtgatgcgaacggcgaccgtatttatgacaacgtggtaccaaacgatgtcttcgacgtccgtttagccggtctggaaaccaacccgggcggtacgctggagctgggcgttgactacggtcataccaacattcctgacgactactacctgcaacctggcgcctctaaagatggctggctgttcaccgctgaacacacccagagcatgatgaaaggcttcaacaagttcgtactgcaatacggtacggattccatgacctctaacggtaaaggtattccacagggcggcagcatcgataacgacggctctatgtggcgcgtgctggatcacggtgcaatcaccctggcagaccgttgggacctgatgtacgtcggtatgtaccagaacatcgatcgtgacaacaacaacggtaccgagtggtggaccgtgggtgttcgtccaatgttcaaatggacgccgatcatgagcaccttgctggaagtgggctacgacaacgtcaaatctcagaaaactgacgacaaaaacagccagtacaaaatcaccctggcacagcaatggcaggcaggcgacagcatctggtcccgtccggctatccgcgtcttcgcaacctacgcgaagtgggatgagaaatggggctacgcgaacaacggcgatacgggctacacctctggcgtagcgtatagcgacacttccgcgaaaaccttcagccgtggcgacaacgatgagtggaccttcggcgcccagatggaaatctggtggtaattcgtcaagcctgacgtaatgacctgaaaagaggggcgcaagcccctctctccttagggtgctgcgcgctattgcctggccaccgcagtgctcacgctatcagaggtaataacaatgaaaatgaagaaaagtctcgtcgcgctgtgcctctctgcggggctgttggcctgtgcgcctgcggtcacctttgcagatgtgaattttgttcctcaaaataccagcgctgcgccagctattccggctgccgcacttcagcaactggtgtggacgccagttgatcaatcgaaaacacaaactacccagctttcagcgggggggcagtcactgaacgtgccgggtatcagcggtccggttgcggctttcagcgtgccggcgaatatcggcgagctgaccctgacattgaccagtgaagtcaataaacagaccagcgtcttcgcgcctaacgtgctgatcctcgatcagaacatgacgccatccgcattcttcccaagcgattatttcagctatcaggagcctggcgtcatgagtgccgatcggctggaaggcgttatgcgcctgacgccagccctgggtcagcagaagatttatgtcctggtgttcacgactgaaaaagatctgcaacagacaacgaagcttgttgacccggcaaaagcctatgcgaaaggcacggggaactctgtcccggatattccggacccgcttgcccgtcataccaccgatggtctgatcaagctgaaagtctccaccaacagcgcctccagcgtactcgtaggcccgctgtttggctcatctggcccgggtccggtaacggtgggtaatactgccgcgcctgtgtacgccgcgccagccgcagccccggccgcagccccggccccggcgaaaaaagccgagcccgtgcttaacgatactgaaacttactttaacaacgccatcaagcaggcggttaaaaacggcgatgtcgataaagcgctgaaactgcttgatgaagccgagcgtttaggttcaaccactgcccgttccacctttatcagcagtgtaaaaggcaaggggtaaccgtctccccacagtgctgattttgttagtcgtttagtgcgccttcacgggcgcactttttttgccactactaaggggcaatctgttcagaacgcattatccctgacgcggaaagaaagaatgatgcgatcccagatttccactagttcagcgtcgctgtaatcaggtggggatgagacatcgcttccttcaggtaagatttcattgcttaatgtcagatcaaggctggggtgtgcaaaatcagcgttggtttcattggctacggcggtaaacattagttgttttgacggattttcggatgatttatctggcggggcggtgattagccattcactggcattaaaaccggcaatgcgtgcttctccttttcgcagcgtacttccgtctatgctattgatataagattgaatttccccgctgcgctccagcatggttgtgctttccttaagggcgttattgctccagactgaaaaagaaaacaccgaactataggggtaaacaaaggtaatatcttccttaggcttgccgtttccgtcgcggataaacccttgcggaatacaggtgccgggcacggaaggaatatcctcattatgccgtccgctcagtcgggacatgaggtcctgtaattccgccagtttctggggtttatcattcgccatccagtcaggtcttcccgcttccttgcgcagataaaacgctcgctctttagcgaagcgcggatcagaataatcggtaatcccctgcatgaggataaacgctactccgtcaacgtagagatgaccttccagaatgcgcccaaatcccgccacactctcattttcattacggtcaaaaatgaccgcattatcactcagcttgtatatctgcttaagaaatggctgatcaacagggtccacggtagcgctgtttttcagtttctgttcccgcaaccggatacgctgctcaaatgccgggcggtagagtcgcttgctgctgatgcggatctcattaatctgtgcccggtcagtcagggtgttttcgaatgaggccggaacctcaaacacatagcgccccacgcactgggatttggtggtggcaaaaagagtattaaccatacgtttttccttgtccgttaacgccgggggcgcatgcacaaatgtcacatagttatggatgtaatatcctgccgccagcagcaggagcgtcagcgtaacaatcaggggggatgtgtcttttttcatggggcgggaacctgctgcacaatcttcaccaccgagcgaaccgtgaacaccagtgcgtcggagagatcgctgtataccgagcgggagagatcgacaggatcgacagcataagctccttcatgatcgacatctgtcgccaggacgccctgaatacgtgaagagctggtgcagacggaggtgatcggcacggtcccatcgccggggcttgcggatgaaattagttgatgggaccttaacggggacagttcaaaagggttagctgcattttccctgctcctctgcgcttccttaacgctcagggggatccgctcttcccatgtcaggaatccatctgacgggttgcttttgctggctccgtaaaatagccaggtctgggggtggtatttgccgtttaacttctcaataaattttttaacgatattacttattgttttctcatatttattacattcgaccctagtatcatccagcagcaaatcctgctcacatagccgccaccacgctgttttgttgagataaatttcctcatacggatcggccaccgggagggaaagttgagtctctttactgttgattttcagccatccctgaccataagccatacccggcagaagctgtaacggaccgggagactgtgccagcaccggcatcagcttttcagcactttccccgataatcattccagtaatgccacgctcaccgatcttcatgcggcgataagctgccggtgagccgagatccggcatgacgccgtgtacgatacccaggattgagtcttgtccgcccatattttccgagtaatggcgggcgaccagtccgcccatcgaatgggtgatcaggacgaccttgttgactgccaggcgtccgtgatacgcactcagcaccttacggatatattcgcccagcaacgccgcagagtccgcattcgattgcagccagttgtaaccaaaaacgtgcagcgggaataagaacttgtgcccgtgagccacttcttcttcgctcagcacctgctcctgaggctcgttaccgattctgacgccgataaaacgctgacgtgccgtttgcaactgtgtctcccgaaagtaattatccatcaggatctcgtcgtcgctgagcaggtattgcagccggtcaagcgcctcaccgtagttcatgtaaaacgcacttccccatccgcgggcgtgacgggacgggaattttttcccatccgcaccgtcgtttaaaatttccccagagtcatcgacgacggtggtcgtcggatcaagcagttgctttcttttttgggggccagcaagtggccattttttaagcgatgacaagctgaactgccagacttttttatccccactctttaagtttgaccccatcaccccaggaataaaaatcaccgggatcacttttgtagggggcttgagacaaaccgagatgtggtttttgtcttttggctgagaaaaaactttataatgaaacgtgccatcgtcatcccagatgggacgatgataagaccgattaggggggctatttttgttgtcatccatgtattaagttactgatattccttctcaagagctgcattagctcacaatttatccgcgcgatacttaaccaaaatcaagttctgctattgctgccacgaacatttctcccgcgctgttgcaccattgttgcgatagtgatcgctaaatttggtttgtccgtcctcattttgccaatctgcgatacaatgcctttacgttatgtatcggagagtctggcatgtcacaccccgcgctaacgcagctgcgtgcgctacgctatttcgaccaaatacccgcgcttgacccggagcaactggactggctgttgctggaagattccatgacaaaacgttttgagcaacagggtaaaacggtcacggtgacgatgattcaggaagggtttgtctcgcctgcggagattgccagcgagctgccgctgctgccgcaagaagaacgctactggctgcgtgaaattttactgtgtgcagatggcgagccgtggcttgccgggcggacggtggttcctgagtctacactttccgggccggagctggcattgcaacgcctcggcaaaacgcccctggggcgctatctgttcacctcgtctgaactgacccgtgattttattgaaattggttgcgatgccgatttgtgggggcgccgttcccgccttcgtttgagtggcaagccgttaatactgacggaactctttttgcctgcatcgccgttgtactaagagggagaaaaaatggagtggagtctgacgcagaataagctgctggcctatcaccgcctgatgcgtactgataaacccattggcgcgctgctgctgctgtggccgaccttatgggcgctgtgggttgccacgccgggcgtgccgccgctgtggatcctggcggtgtttgtggcgggcgtctggctgatgcgcgctgcgggctgtgtggttaacgactatgctgaccggaaatttgatggacatgttaagcgcaccgcgaatcgtcctctgccgagcggtcaggtgaccgggaaagaggcgcgcattctgtttgtggtgctggtgcttctctcttttatgctggtgttaacccttaacaccatgaccattctgctgtccgttgctgctctggcgctggcctgggtttacccgttcatgaagcgatacacccatctgccgcaggtggtgttgggtgcggcatttggctggtcgattcccatggcgtttgccgcggtcagcgagtccgttccgctcagctgctggctgatgttcctggcgaatattctctgggccgttgcgtacgatacccaatacgcgatggtcgatcgcgatgacgatctcaagattggcatcaaatcgacggcgatcctgtttggtcgtcacgacaaacttatcatcggcatattgcaggtggcggtgctggcgctgatggtggcgattggtcgcctgaacgggctgaactgggagttttactggtccgtactggtggcggggctgctgtttgcgtatcagcagaagctgatcgcgaagcgcgagcgtgaagcctgctttaaagcgtttctgaataataactacgtcgggctggtgctgtttctgggcctggcgatgagttactggtgataaaaaagccgggtggcggcttcgccttacccggcctacgatttagcggaacatataggccgggtaagcgttagcgccacccggctttagcatcattcgccctgcgtcgaactctcaatcgtcaaacgcacatccgcggtaatcagctctgccagcatctggtaaaccttcatcgtctcttccggctcggcatcgcccgtatcgctaatgtacccttcgtcgcgcagcgtcagcaccagggagctgaataccgctttgtcgaagaattccggggcgttaatgccatgcagaacagaaaggcgctgagccagcgtccggctctctttttccagcgtaccgcggttgatggacggatttgcactcagcaaccagaaggtaatggcgtagcgctgcaacgtctcacgcgcaccggaagccaggagctgcaaggtacgggaacgtgacggattgatatgcagttcatcatcaatgatggtaatcagcccctgacgatgcatctctgccgtcattttatcgagctctgccgccagttcatccttactccagcgcaggaacagctccgctttcagcattgggtagatggcctgaatatggcgcagcagctcctgacgcgaaatacggcggtgctgggtaataatggccgccatcagcgacggcagcatcagcatgtgcgtgatgttattgcggtagtaggtcatcagcacggcctgctcgcgcggcagaatgatgatgtcaccaatcgtatctttctcgacttcgaacttgttcatctgcaacgcgtgatcgatcagctcgctggcggtggcagacggcacggtcgaatcaacggaatacggcacgttgcgcatgatatccaggtagcagtcaatctgctcggtcagctgttcgcgggtcagtgaacgctggcgggaggccagaagcgcagtacaacacaggttcatggcgtttgccgcaccagcattgttgatgcgtaccatcagctcggatgcaatgccgttgaccgttggcgtcagccaggccggacgtaccgcttcgataggatcgatagactcgcgccactccggaacatgatggttcagatatgtcatcagcggcaggggctcgccaaagttcacgtagccctggccgaggttgcgcagtttactcagcccacgcagcatctgcggcagactctctttctctttggttgcaccgcgcagctctttcgcgtaggtgcccacttccatcacgtgttcataaccgatgtaaataggcaccagcgtgataggacgcgtaccgccacgcagcatggcctgaatggtcatcgacagcgtgccggtcttcggatcgagcagacgaccggtacgcgagcgcccgccttcaacaaagtactccacggaataaccgcggctgaacagctcgcccagatactccctgaagacggtggagtaaagcttgttacccttaaaggtacgacgaataaagaacgcacccagacggcggaaaatcgggcctgctggccagaagttcaggttgataccggcagcaatatgcggcggcaccagcccctggtgatagagcacgtaagagagcaacaggtagtccatgtggctgcggtggcagggcacatagacaatctcgtggccgtcgtgcgctaactgacgtacgcgctcggcgttgtggacgttaatcccctgatagaggcggttccacgtgaagccaaggatacggtcagagaggcgaatcatctcgtaggagaaattcgcggcgatctcttccatcagcgctatcgcgttctgctgcgctttctcgtgcgaaattttcttgctgcgcgcttcgtcttctacggcacgggcaatcgctttggaagccagcagcttgttgaacagatcctgacgtgccgggagacgtggtccaacggccgccagacgctgacgtgcaaagtgcatacgcgcaacgcgcgccagcttttgcgcaatgattttgtcagtgccgtgttcatccgccatgcggcgcagtgaaacggaaggtgagaagcggacaaagctgtcgcgtcccagccaggagacggcgaagaacttctgaatgccgttgagcatacgcagcggcgggttctcttcccctttttcgcgccccggacgacggccaaacatcaccgacaccggcaccatctgcacgtccagatcggggttgctgcggtgcagatcgaggtaatcatggaacagcttaatggactcttctttcggcgtgtaataggtgaacacgcgcggcccgccatggatgaacacgtagcgcggcagcagcgtaccgtcgacttccagcggttcaagcgggtcaggtaaatcgtgcgccagacattgagcgcgaagcgtcagcaggtctgccttcgagttataaggcaaaacgtacataatagggcgcgacgtatcgagccctaattccagcgcaggttctgctgggatagacttactttttaccaggacgcttaatggtaaattaagtaatttgtagtaaattcgtggccagccggacataaacgatgtaaagcctctggttaataatgcaattgcggcgcaaggataacagaaagcgcgcaaaatttctgttgttacccgtcatacttcaggttgcagcaaaacgcgctgcggctttagttacagacgctatttatcataaaaggttcttttaatggccaataataccactgggttaactcgaatcattaaagctgccggttattcatggaaaggtttccgcgcggcatgggttaatgaagccgctttccgccaggaagcggttgccgcaatcgttgccgttgtcgtcgcctgcttccttgatgttgatgctatcacccgcgtactgctcatcggatctgtccttctggtgatgatagtggaaattctgaatagcgctattgaggccgtagttgatcgaatcgggtcggaattccatgaactgtctggccgggcgaaagacatgggttccgctgccgtactgctggcgattatcactgcggcgatcacctgggtcacgctgctttggtcgcatttccgatgagcctcgaggaataattaagtccctggttttttgtgcagtttttggttccaaaatcgcctttgactgtatatactcacagcataactgtatatacacccagggggcggtatgaaagcgttaacgaccaggcagcaagaggtgtttgatctcattcgggatcatatcggccagacgggtatgccacccacgcgtgcagaaattgcgcagcgtctgggcttccgttctcctaatgctgccgaagagcaccttaaagcgctggcgcgtaagggcgtgattgagattgtttccggcgcctcacgcggcattcgtctgcttgtggaagaagagagcggtattccactggtgggccgcgttgccgcaggtgaacctctgctggcgcagcagcacatcgaagggcactatcaggttgacccaggcatgttcaagccgagcgccgatttcctgctgcgcgttagcggaatgtccatgaaagatatcggtattctggatggcgatctgctggcggtacacaaaacgcaggacgtgcgtaacgggcaagtcgtggtggcgcgcattgatgatgaagtgacggttaagcgccttaagaaacaaggcaataccgtgcagcttctgcctgaaaacaatgaattctccccgattgtggtagatctccgcgagcagagcttctctattgaaggactggcggtcggcgttatccgcaacggtgaatggctgtaatctcttcctgacaggctgtagttcctctacagcctggcctgttttctgattccggtaatttccatggcattgctaacttctgccgataaggcgttgtggcgtcttgcgctaccgatgattttttccaatattaccgttcctctgctggggctggtggatacggcggttatcgggcatctcgattcgccgatttatcttggcggcgtcgcgatcggcgcaacggcgaccagcttcctctttatgctgctgctttttctgcgcatgagtacgacaggcctgacggcccaggcgtatggtgcaaaagatcccctgcgtctggcgcgtgcgctggttcagccgctcattctggcattcggtgctggcgcgttaatcattctgttgcgtacgccgctgattgatcttgcgctccatattgtaggcggcagcgatgccgtactggaacaggcccggcggttcctcgaaattcgctggctcagcgcgcccgcttcactggcaaacctggtcctgctgggctggctgctgggcgtgcagtacgcccgcgcgccggtgatcctgctggtggtgggcaacctgcttaacattgtgctcgatctctggctggtgatggggctgcacatgaacgtccggggcgcggcgctggccacggcgattgccgagtacggtacgctgctgatcggtttggggatggtctggcgcgtgctggcgatgcgcggtatcaccctggatctgctgaaatcggcctggcgcggcaacattcgtaagctgctggcgcttaatcgcgacatcatgctccgttcgcttctgctgcaactctgctttggtgcattaaccgtttttggtgcgcgtcttgggcctgagatcgttgccgtcaacgcagtgcttatgacattactgacctttaccgcttacgcgctggatggttttgcttacgccgtggaggcgcattcagggcaggcctatggcgcgcgtgaaagcggccagttacgcgaagtctggcgtgctgcctgtcgtcaggcgggcctggtggcgctggtctttgctctggtatacgcctgttttggtgggcatattgtcgcgttactcacctcgttgcccgcgctacgtgagctggccgatcgctacatcctctggcaggtagtattaccggtggtgggcgtgtggtgctatttgctggacggcatgtttattggtgcgacgcgaggggcggagatgcgcaacagcatggccgtcgcggcggcggggttcggcctgacgctgctaaccctgccgtatctcggcaatcatggtctgtggctggcgctggcggtcttcctctcactgcgtggcctttcgctggccgttatctggcatcgtcactggcgaaacaatacctggtttccagccccgcacgatatatcgtaacggttaaagattccgaatataaaaacaactgccgaatccttaactacaataataatcacgtccagcagaaaagaacgaagcggacgatactcatagacgcttaacacgaggacacgattatgaataaagacgaaatcggcggcaactggaagcaattcaaaggtaaagcgaaagaacagtggggtaagctgacagatgacgatatgaccgtcattgaaggtaagcgcgatcagctggtaggtaaaatccaggagcgctacggttacgaaaaagatcaggcggaaaatgaagtcaaagactgggaaacccgtaacgactaccgctggtaaccggcactatccccaagggcggccctgagccgcctttttctttggctttaacgcggctttttcttcaccaggatagagtgatcgtgctgacaggcatcctgatggcggcatgactccacctccacgcaggcagaacataagccgtgggcttcaatcacgttatggcgcagcgcaaagcccattctggctgccagcgtatgcataatatcttccacaccttccgcacactcttccttcaccacaccacagcgatcgcagataaacatggcggacgtgtgagttggctggtcaaaaagatggcacagcacatagctgtttgttgattccactttatgcacaaacccttgctccagcagaaaatccagcgcccgataaacggtcggcggttttgcctgcggctcgctttcacgcagcagatcgagcagatcgtaggcgctgatggcgccctgttgcaggctcatcagacgcagtacctcaaggcgctgcggggtcaggcgcacattgcgttgcgcgcacagcttttcagcttgcgctaacagctcttttgtggacttgtccatcgggcacctcggatatggtaaggggtgaaaacattcactttatcatgttctgctaaaaacaccgagatccgccaggctgtgctatacctgacgcatcgcaaatcaggagatcgcaaaatgaaaagacctgactgtattcggcactggcgggacgtggaaggcgccgatgacgcaacgtatcctgacagcaacgaacgtttttctattggcgcgccgctggcccgcaaactgggtctcggccgcattggtattcaccatgaacggctgccgcccggacgccgtacgtcttatccgcatgcggaaagcgacgaagaggagtttgtttacgttctggagggttaccctgaggcctggatcaatggctatttatggaagctcgaacccggagacagcgtgggatttccagccgggacgggcgtgtgtcacacctttatcaacaataccgatgaagaggtgcgcttactggtggtgggtgaggccaataaaaaacataaccgcatctactatccgctcaatccggtgtatgccgcgacgcgcgaagaccgctgggtcgaccatccgcctcagttttttgggccgcacgatggaaaacctgggcgaaaataatttcctcttctataaatattgatggtcgtcacatattacaacaggccgggatggaatttaacttaaggaaatagcgggtctttttgcacttattcacagcaatagttcgttcctgtttgggtgataacagacagggttaactaataacaaactatttacgagcacactgtgaaaaaacattttaaattttcgatggttagcatcgctgtctccttttttatggcaaatcaggcgggagcagccaatacctggacggaagcgcgtagcgacgcaatgggcggaacgggtgtcgcggcagggagctatggcagcggggcgttaatcaaccccgcgttactggcaaaatctaagcccgaggatgatgtgacggttattttgccgtccgttggcgtgcaggtgaccgatgaagacaatcttcaggacgagattgataccattaacgacaaaatcaatcattacaaggatgtggttgatagtctgacccccattgaagttatcaccaatccattaggttcgatcaatcagttccagggcgcagcgaaagatctcgctgatgaactggactacctgaaaggcaagaccgcacacgccaccgctggggcggggattgccgtcagtatccctaacgatgttctttccgtggcctttatggcaaaaggctatgcccatggccgggtcagctcttcaatcgatcagcaggacattgattatctgcgcggtatacaacgaagcgatgcggtggctgccggtgtggcgctggatgccgcgctaaacggtaccgatcagatcaccaaaaaccttaactctacggcgtctggtcgggcggcgattgtgtccgactacggtattgcggtggcccgtcagttcgatcttggcggcgttccggtttccgttggcgtcacgccgaagctgcaaaaaacctggctctataactacaccacttcaatctacgattacgacagtaataagtggaacgacagccgctaccgtaccgacgacactggcttcaacgtcgatgccggtattgctgctgattttggtgaaaactggacggtcggcgtgagcgggcaaaacctgatgtcgcgcgatatcgataccaaagatatccgcattcgcaacgggcgtacgggagaggtggtgagttataaagacacttatcagatccgtccgctggtcactgccggggccgcctggcacaacgatctggtcacgctgaccgcagacggcgatctgaccgaaaccaagggctttaaaagcgaagacacctcccagtacgttggcgttggtgccgaagtcacgccactgagctggctggcagtacgcgccggttatcgtgcggatatgaaagggaacgacagcaacgtctttaccggcggtgtcggtttcgcgccgttcaactccgtccacgttgacctgatggggctttatggcgaagacgagacctggggcgcaggggcacagttgagcatgacgttctaaagtacaccggaggcgctgcgcctccggcttttctttgtgctatagtagcgccccttttccaccagatgcttaaaacttcgccatgtcgtcagaattccagaccgctttccctgcacaccgtttctccattgcgccaatgctcgactggacggacagacactgccgctatttcctgcgtcagctctcccgccatacgctgctgtacaccgaaatggtcactaccggcgcaattattcacggcaagggcgattatctggcgtacagcgaagaggagcatccggttgcgctgcaactgggtggcagcgatccggctgcgctggcgcagtgcgcgaagctggctgaagaacgcggctatgacgagattaacctcaacgtcggttgcccgtccgaccgtgtgcaaaacggtatgttcggcgcgtgtctgatgggtaatgcacatctggtggcggactgtatcaaagcgatgcgcgacgtcgtctctatcccggtcacggtcaaaacccgtatcggcatagacgaccaggacagctacgagttcctgtgtgatttcatcaacaccgtatcagggaagggtgaatgcgagatgtttatcatccacgcccgtaaagcctggctctctggcctcagcccgaaagaaaaccgcgagatcccgccgctggactacccgcgcgtgtaccagctaaaacgcgacttcccgcacctgaccatgtcgatcaacggcggtattacgtcgctggacgaggccaaagcgcatctcgaacatatggatggcgtgatggtcggacgcgaggcgtatcagaatccgggcattctggcgacggttgaccgggaaatctttggcgttgacggtgctgacaccgatcccgtggcagtagtgcgcgccatgtatccgtacattgagcgcgagctgagtcatggtacgtatctgggccacattacccgccatatgcttggcctgttccagggcattcctggcgcgcgccagtggcgtcgttatctcagcgagaacgcgcataaggccggtgcggatattgaggtcctggaacacgcgctgcgtctggttgcggataaacgttaaatttcgctaaaagatggtcaaatacgccacgccctgcaagacattgcggggcgttttgctttcagaacaacgacttatttttggcatgtttcttgtaacgatcgcagcatcattcgggaactcgtgggagagcaccatgctggaactactttttgtgattggcttctttatcatgctgatggtcacgggcgtatcgctgctcggcatcctggccgcgctcgtcgtggccacggtggtgatgtttgtcggcggtttatttgccctgacgattaaactcttgccgtggttacttctggcgattgcggtggtatgggcgatacgggcgattaaatcaccaaaactgcccacttatcagcgtaataaccgcttccgttactaaggtattgaggtgtacgtcacatacctgcaacttttccggcagcaatccttagaacagaataggatttacttatcgaatctgtcactatggctgccgctaaagaattcatcgagctgtaccctacatacagccgaactaaaaaaagaaagggcttcccacgggaagcccaatttctttttatggctcagggaattaacagacttgatccctgcgttgcccggctctccagcacctcatgcgcgcgctgcgcatcggtcagcggatatttctgcgcctctgccacatccactttaattaccccactggcgatcagcgagaacagctcgttgctggcttcctcaagttcttcccggttggtgatgtaaccttgcagggaagggcgagtgacgtatagcgaccctttctgattcagaatgcccaggttgacgccggtgactgccccggaggcgttaccgaagctcaccattagcccgcgacgttgcaggcagtccagcgaagattcccaggtgtctttccccaccgagtcatacaccacgcggacctttttgccgccagtgatctctttcagccgctcaacgatgctctcttcccggtagttgatcacctgccatgcgcccgcgtccagcgcgcgctgcgctttttgcgcgctgcctgtggtgccgatcagcttcgcgcccagggctttcgcccactggcaggcaatcagccccacgccacctgcggctgcgtgaaacaggaattgctcgtcaggcttaatttcgtaggttttgcgcagcagataatagaccgtcagccctttcaggaatgaggcggcagcctgctcgaagctgatcgcatttggcagaagcgccgctttctcggccggaacgttatggatggagctgtaagcgcccagcgccgactgcgcgtacaccacgcgatcgccttccttaatgtgcttcaccgcgctgcccactttgctgacgataccggccgcctcggtgcccagtccgctcggcatcgacggaggcggatagaggccgccgcgaatataggtatcgatgtagttaatgccgatcgctttgttttccacctggatttcgttctcgccaggcgcagcgggggtaaattccaccgctttgagtacgtcagggccaccatgcttgtgaaattcaatacgtgttgccatgcttcctccagaatgtggtaatctttcgacccactctttatctcggtaactccattcactatggcaggaaacaaacccttcaacaaacagactgaacctcgtgagcgtgattatcaggtcgccgggttaaaagtcccgccgcactcgattgaagcggaacagtcggtgttgggcggtttaatgctggataacgaacgctgggacgacgtcgccgagcgcgttgtcgcggaagatttctatacccgcccgcaccgccacatctttacggaaatggcgcggttgcaggagtcgggcagcccgatcgacctgattacgctcgcagaatcgctggagcgtctgggtcagctcgacagcgtcggcgggtttgcctatctggcagaactgtcaaaaaacacgccaagtgccgcgaacatcagcgcttacgctgatatcgtccgtgaacgtgccgttgtccgcgagatgatctcggtggctaatgagatcgccgaggccggtttcgatcctcaggggcgcaccagcgaagatctgctcgacctggcggaatcccgtgtctttaaaatcgccgaaagccgggcgaacaaagacgaaggcccgaaaaatatcgccgatgtgctcgacgccaccgttgcgcgtattgagcagcttttccagcagccgcacgatggcgtgacgggggtgaacaccggttatgacgatctcaacaagaaaacggcaggtcttcagccatcggatttgattatcgtcgcggcgcgtccgtcgatgggtaaaacgacatttgcgatgaacctcgtcgaaaacgcggcgatgttgcaggataagccggtgcttatcttcagtcttgagatgccctctgaacagatcatgatgcgttctctggcgtccctgtcgcgcgtggatcagacccgcatccgtaccggtcagctggacgatgaggactgggcgcggatctccggcacaatggggattttgctggaaaaacggaacatctatatcgatgactcctccggcctgacgccgacggaagtgcgctcccgcgcgcgccgtatcgcccgtgaacacggtggcatcggcctcatcatgatcgactaccttcagctgatgcgcgtcccgtcgctttccgacaaccgtacgctggagattgccgagatttcccgctcgctcaaggcgttagccaaagagctgcacgtgccggtggtggcgctatcgcagcttaaccgctctctggaacaacgtgcagacaagcgcccggtcaactccgacctgcgtgaatccggctccatcgagcaggatgccgacttaatcatgttcatctaccgtgatgaggtttatcacgagaacagcgatctgaaagggatcgccgaaattattattggtaagcaacgtaacggccccatcggtacggtacgtctgacctttaacggccagtggtcgcgtttcgacaactatgccggtcctcaatatgatgatgagtaatttctaaggaattcaaatgcaagcggcaactgttgtgattaaccgccgcgctctgcgacacaacctgcaacgtctgcgagaactggcgcccgccagtaagctcgttgcagtcgtgaaagcgaacgcttacggacacggtcttcttgagaccgcgcgaacgctccccgatgccgacgcttttggcgtcgcccgtctcgaagaagctctccgcctgcgcgcaggtggaattacgcaaccgatactgctcctggaaggcttttttgaagcctcggacctgccgaccattgccgatcagcacctgcacacggcggtgcataacgaagaacagctggccgcgctggaaacggctgaactgagcgagccggtcaccgtctggatgaagctcgacacgggcatgcaccgtctgggcgtgcggccggaaagcgcggaggcgttttatcagcgtctgagtcagtgcaaaaatgtgcgtcagccagtgaatatcgtcagccactttgcccgcgccgatgagcctgaatgcggcgcaacggaacagcagcttgatatcttcaacaccttctgcgaaggcaaaccggggatgcgctccattgcggcgtccggcgggatcctgctatggccgcagtcgcacttcgactgggcgcgtccgggcatcattctttatggcgtttcgccgctggagaacaaaccctgggggccggactttggctttaagccggttatgtcgctggtttcaaagctgattgccgtgcgtgagcacaaagcgggagagccggtgggttacggcggcacctggaccagcgagcacgacacgcgtcttggcgtggtggcgatgggctacggcgacggctatccccgcgccgcgccaactgggacgccggtgctggtcaatggacgcgaagtcaagattgtcggtcgcgtggcgatggacatgatttgtgttgatcttgggcccgacgcgcaggataaagcgggggacgatgcggtgatgtggggtgaaggcctgccggtagagcgtattgctgaaataacaaaagtgagtgcttacgaacttatcacgcgccttacctcaagggtcgcaatgaaatacgtcgactaagcatgagcgggatgagatgcatcccgcttctgttaacatcccctcgatcttcttccgcttccggtttattgttgaatgccctgcctcataataatccggagaacatcgcgtgtttcagaaagtagacgcctacgccggcgaccctatcctctccttgatggagcgtttcaaagaagatcctcgcagcgacaaagtgaacctcagcattggtctttactacaacgaagacggcatcattcctcagttgaaagccgttgccgaagctgaagcgcgtctgaacgcaaccccgcacggtgcttcgctttatctgccgatggaaggattaaacacctaccgcaacactatcgcgccgctgctgtttggtgcggaccacgcggtgctcgcgcaaaagcgcgtggcgactatccagacgctgggtggctcgggtgcgctgaaggtaggcgcagatttcctgaaaaagtacttcccggattccggcgtgtgggtcagcgacccgacgtgggaaaaccacgttgcgatcttcgagggcgcgggctttaaggtggcgacctatccgtggttcgacagcgaaaccaacggcgtgcgcgttgatgcgctgctggaaaaactgaacaccctgccggagcgcagtatcgtattgctgcatccgtgctgccataatccgaccggtgcggacctcaccaatgcccagtgggatgcggtgatcgagatactgaaggcgcgtaacctgatcccgttcctcgacatcgcctatcagggctttggcgcgggcatggaggaagacgcctatgccattcgcgcgattgccagcgcggggcttcccgctctggtcagcaactcgttctcaaaaatcttctccctgtacggcgagcgcgttggcggcctgtccgtggtgtgtgaagacgccgaagccgcgggacgcgtactcggtcagctgaaagcgacggtccgccgtatctactccagcccgccgaactttggtgcgcaggtggtggcgacagttctcggtgacgaaacgctgaaagcgtcctggcttgcggaagtggaagcgatgcgtaagcgcatcctgtcgatgcgtcaggagctggttaacgtcctgaaagaggccgtgcctgggcataactttgattatcttctcaagcaacgcgggatgttcagctacaccggactgagcgcagcgcaggtcgatcgcctgcgcgaagagttcggtgtctacctgatcgccagcggccgtatgtgcgtggcgggtctgaatgccagcaacgtccagcgcgtggcgcaggcgtttgcatccgtaatgtaagcattcacttacttgcatactgtatgtaggccgggtaaggcgtagccgccacccggcttttttgttcgcgtcggtgccagtcattgcccggtggcgcttcgcttaccggacctacacgtttcttctgcgctttgtgatcgtcttctttttattcagccccataagtaaaaactcctttccttcccctaccgctggggttatggtcggatagttttttgaccatccgctcaaaataaaaagataacaaactgaatattcaggggaaaatatgcgcaagatcacactggcgctcagcgccgcctgcttattgttctcgcttaatagcgccgttgttgcacgggcttctgcacccacgccgctttacaccggcaccaccgccgccattcttgccgaacaggcccccattcactgggtttcagtggcacaaatcgaaaatagcctgacgggtcgcccgccgatagccgtgggcttcgatattgacgataccgttctcttctccagccccggtttctggcgcggcaaaaaaacgtactccccggacagcgaagcctatctgaaaaacccggaattctgggaaaagatgaacaacggctgggatgagttcagtatcccgaaagaggttgcccgcgcgctgatcgccatgcacgtaaagcgcggcgacagcatttacttcgtgaccggacgtagccagaccaaaaccgaaaccgtctcgaaaacgctacaggatgatttcctgatcccggcggccagcatgaacccggtcatttttgccggggaccacgaagggcaaaacaccaaaacccagtggctggaaaagaaaaatatcaaagtgttctacggggattcagataacgacatcaccgcggcgcaagacgtgggagccagaggcatcagggtgttacgcgcctcgaactccacctaccgaccgctgccgatggccggaaaatttggtgaagaggtgatcgttaactctgaatactgacgcattaacggcggggtgaatgcttttttaatcaaatctcgctgcgcgggttttacctttcgctttcttgctgcacacttagaaagattcacctttcataatggagcagcacatgtggtaccaacagaccctgaccttaagcgctaaaccacgcggatttcaccttgtgacggacgaagtcatcgggcaaatccgcgacctgtcgcgcgtcaaaacgggtttactgcatctgctgcttcagcacacgtccgcctctctcacgctcaatgaaaattgcgatcccaccgtccggtccgacatggagcaccattttctgaagagcgtcccggacaacgccccgtatgagcatgattacgagggggcggacgatatgccttcgcacatcaaatcctctttgctgggcgtctcgctgatgctgccggtccacaacggacggctacagctgggaacgtggcaggggatctggctgggagaacatcgcattcacggtggttcgcgtaaaattatcgcaacgctacaaggggaataaagatgacaatttcggagatacttcagtactgcatgagcaagccgggtgcggaacaaagcgttcacagcgactggaaagccacgcagatcaaagtgggggatgtgctgttcgcgatggtgaaagaggtggatgcgcggcctgcggcatcactgaaaaccagtccggaactggcggacttactgcgccagcagcacgatgatgtcaggccaagtaagcatctgaataaagcgcactggagtacggtgtttctcgacggctcgctgccagattcgcaaatttactacctggtggatgcgtcgtatctacaggcggtagaactgctgccggaaacgatccgacagcagctctccgtgtgacgattacagcaacggtttgaggaagcgcgcggtgtgcgaggcttcgcactctgcaacggtctctggcgtaccggagacgaggatttcaccgccgccgctgccgccttccgggccgagatcgacaatccagtcagcggttttaatcacgtccaggttgtgctcaatcaccacgatggtgttgccctgatcgcgcagctggtgcagcacgtccagcagctgctggatatccgcaaagtgcaggccggtggtcggctcatccagaatatacagcgtctgaccggtaccgcgtttggacagctcacgcgccagcttcacgcgctgcgcttcaccgccggacagcgttgtcgctgactgccccagacgaatataggtcagacccacatccatgagggtttgcagcttacgcgccagcgcagggacggcgtcaaagaactcgcgcgcctcttcgatggtcatatccagcacttcgtggatggtcttgcctttgtacttaatctccagcgtttcgcggttataacgcttacctttgcactggtcgcacggcacgtagatatccggcaggaagtgcatctcaaccttgattacgccgtcgccctggcacgcttcacagcggccgccgcgcacgttaaagctgaaacggcctggcgtatagccgcgtgaacgcgcttccggcacgccggcaaagagttcacgtacgggcgtaaagacgccggtataggtcgcagggttggaacgcggcgtacggccaatcgggctctgatcgatgtcgataaccttgtcgaaatgctccagcccctgaatgtcgcggtacggcgcaggctcggccagcgtcgcgccgttcagcgccgtctgcgcaatcgggaacagcgtatcgttgatcagcgtcgatttaccggaaccggacacgccggtgatgcaggtaaacagcccgacaggcagcgtcagggtcacgtccttcaggttgttgccgcgcgcgccggtcagcttcagcactttttccgggttcgccgctacgcgctgtttcggcacttcaattttgcgcttgccgctcatgtactggccggtcagcgattcaggcaccgccatgatgtctttcagcgtcccttccgcgaccacctggccgccgtgtacgcctgcgcccgggccgatgtcgatcacgtggtccgcggcgcggatcgcatcttcgtcgtgctcgaccacgattactgtgttgccgaggttacgcaggtgaaccagcgtgccgagcaggcgttcgttgtcgcgctggtgcaggccgatagacggctcatccagcacgtacatcacgccgactaagcccgcgccaatctggctcgccagacggatacgctgggcttcaccgccggacagcgtttcagccgagcgggaaagcgtcaggtagttcagaccgacgttcacgaggaacttgaggcgatcgccgatctctttcagcactttttcagcgattttcgcgcgctgtccggagagcttcaggttgttgaagaagtccatcgcgtggccgatgctcatgtctgagatggtcggcagtgccgtgttttcgacaaacacgtgacgcgcttcgcgacgcagacgtgtgccctcgcaggtggcgcaggagcggttgctgatgaacttcgccagctcctcacgcaccgcgctggattcggtctctttgtagcggcgctccatgttgtgcaacaccccttcgaacgggtggcgacgcacggaagtgtcaccgcgatcgttcatgtacttgaactcaatattctctttgccggaaccgaacaggatcactttatgtacgttcgcgctcaggctggcccacggggcttcaacgtcgaacttatagtgctcagccagcgatttcagcatctggaagtagtaaaaattacgcttatcccagccgcgaatagcgccacccgccagcgacagttccgggttttggatcacacggtccgggtcgaaatactgctgaacgcccaggccgtcacaggtcgggcacgcgcccgccgggttgttgaacgagaacaggcgcggttccagctcgcgcatgctgtagccgcaaatcgggcaggcaaagttggcggagaagagcagctcttccgctttcgggtcgtccatatcggagaccacggccgtgccgccagagagttccagcgccgtttcaaaggactccgccagacgcgtcgccagatcttcacgtaccttaaagcggtcaatcaccacttcgatggtgtgtttcttttgcagctccagctttggcggatcggacaggtcacacacttcgccgtcgatacgggcgcggatatagccctggcttgccaggttttccagcgttttagtgtgttcgcccttacgctctttaatgattggcgccagcagcatcaggcgtttgccttccggctgcgacagcacgttatccaccatctggctcacggtttgtgccgccagcgggacatcgtggtccgggcagcgcggctcgcccacgcgcgcatacagcagacgcaggtagtcatggatttcggtaatggtaccgaccgttgaacgcgggttatgcgaggtagacttctgctcaatggagatagcaggggacaacccttcaatatgatcgacatccggtttttccatcagcgacaggaactgacgcgcgtacgccgagagtgattcgacgtaacgacgctgtccttcggcatacaaggtgtcgaaagccagtgaggatttgccagaccccgaaagcccggtcacgacgatgagtttgtcgcgagggattatgaggttgatattcttgagattatgggtgcgggcgccccgaacttcgatcttatccattcacctttcccggttggaacacggattgcctgatttgtttgaaggacaaacggctgtcagaaacggctaattatgacacaaaatgacctgtttgaatatacagtattggaatgcattttctgatccactgtgtaacaatgtcgagttcgcgggagaactctggaacgtgctacgcaactatcaaagtgcagcatggaaatggtacactcgcgcgtttacactattaagaaacgtattcaggagacacgaacatggccagcagaggcgtaaacaaggtgattctcgtcggtaatctgggccaggacccggaagtacgctacatgccgagtggtggcgcagttgccaacattacgctggctacttccgaatcctggcgtgataaagcgaccggagaaatgaaagagcagaccgaatggcaccgcgttgtgctgtttggcaaactggccgaagtggccggtgagtatctgcgtaaaggttctcaggtctatatcgaaggccagctgcgtacccgcaaatggaccgaccaatccggcgctgagaagtacaccacggaagtggtggtgaatgtgggcggcaccatgcaaatgctgggtggccgtcagggcggtggcgcaccggcaggtggcggtcagaatcagcagcagggtggttggggtcagcctcagcagcctcagggcggcaaccagttcagcggcggcgcgcagtcccgtccgcagcagcagtctgctccggcaccgtctaacgaaccgccaatggatttcgacgacgatatcccgttctgatatccagacgcgtgaaaaacaaaaaacccagacaatatctgggtttttttataacaggctatcaggtaatcaccatcggccagtctggcggagtgtggctcatggcttcaaccatcaccactttaatgttttcccagacggcggcaatgtctaccagcgtaatgccaagcaaacctgtcgcgaaccagcatgcggcgcccaaccctaacagggtgctaatcacagcaagacctgcgtagtcggactttcgaaactgaatgtttaacgtgctggccaggaacatcaaaaccgcgctcaacaacggccagcgcaggagcaccatgctggtggtaatggttgccataaaacacatcctcgacaaaacagacgaactggaatgaaacaatgtttctcgttacataagatgtgtgaactatatcacatttgctgttttattcgccagtatccgcgtgaggtaaaagtgggattattgccggagaaaatatatcgtcgtcgctcagagcgacgtctggtcggaatttttatttttatttcatccagatagtaaaacctttgcaaaacgccatcggctgtatagcgtttacagcagtatatctatggattatgcttgtgtggaacaataaatgtacccgcaaaaataattcatcgcattgaattaattgacttttttggattttgtattctttgttttacactcagcatgctctttgatttcgtggtcttattcttttattcagatatgaattattgcggttgctctctcgattaatgacctgcgaaaagataatgaaagaaaaaagacgcgagattattaacgacagcatgcaggcgctgcatgccctggcgaagctgatgccgcaactcaacgcgcagtgttcgccagttgaaatgctggaaattatcaacagcgcactgggggcaaatctctcatgggtcagtgtcgaatccgcagacgggccgcgcgtggtttgtgccggcgacgtgacgtgtcacgcctttaacgtggcggattttcttgccagcaccctgtnnnnnnnnnnnnnnnnnnnnnnnnnnnnnnnnnnnnnnnnnnnnnnnnnnnnnnnnnnnnnnnnnnnnnnnnnnnnnnnnnnnnnnnnnnnnnnnnnnnnnnnnnnnnnnnnnnnnnnnnnnnnnnnnnnnnnnnnnnnnnnnnnnnnnnnnnnnnnnnnnnnnnnnnnnnnnnnnnnnnnnnnnnnnnnnnnnnnnnnnnnnnnnnnnnnnnnnnnnnnnnnnnnnnnnnnnnnnnnnnnnnnnnnnnnnnnnnnnnnnnnnnnnnnnnnnnnnnnnnnnnnnnnnnnnnnnnnnnnnnnnnnnnnnnnnnnnnnnnnnnnnnnnnnnnnnnnnnnnnnnnnnnnnnnnnnnnnnnnnnnnnnnnnnnnnnnnnnnnnnnnnnnnnnnnnnnnnnnnnnnnnnnnnnnnnnnnnnnnnnnnnnnnnnnnnnnnnnnnnnnnnnnnnnnnnnnnnnnnnnnnnnnnnnnnnnnnnnnnnnnnnnnnnnnnnnnnnnnnnnnnnnnnnnnnnnnnnnnnnnnnnnnnnnnnnnnnnnnnnnnnnnnnnnnncagcgcgcctggcgggtgatctactggaaagagcatattggccgggcggtattttcccctcagcacccaggctatgcgcggctgcaaagcggcgtgctgtgtaaattctcagcgcatggcagacagtgcagtggttatttctttttggcttttaatgaaaaactgacctcgttgccgatattgaaaaatatcgtggtggtattggttgagaagctaaaagattattttgatgacatcatcgtgcgggaaaaaacggcgcaggaaatgcagcgcgtcgtcacgcaatataaaaccttatttgagcgtgctccggtattaatgaacgcctttgacaggcataaccggtgtgtattgtggaatgccgaatgcgaaaaagtctttggctggagtatgactgaaatcggcgagcatcccgatccgctggccctgttttacccggatcctgaggagcgacagcgcgtgcaggagtcggttcgtttcgcaccacttaaggatatgtacgaatggcacccggtgcgtaaagacgggacgcagttaaccattctctggtcaaacatccttttgccggataactccattctcaacattggcctggatatcaccgaacgtaaaaaagcagaacagcagctgaccgtcaaagccaccacggacgatctgacgggctgtctgaatcgctcgacaatcttacagcggctcaaaatagcgctggcagccagttcgccgcaggatgtcagtagccacttctgtctcctgatgttcgatctcgattatttcaagcagatcaacgatcggtggggacatcaggttggcgatgcggcattgatccacttttgcgaccgtattcgcgaggtgagcccggccgggtcggcgctgggacgggtggggggcgaagagtttgttcttctgctggcgcacacggatggtatggccgctacgttgctctcttcccggctgcgtgccgcgctgatctcaaaaccgctgcgtgtgggcgataaaacgctggtactctctttcagcgccggggtggttgaagtctgtcaggggcaacgggatacttctgccatactgatgcgtgccgataaggcattatatgacgccaagcgtacgggaagaggaaaaacggtcctggcgtctgattatttataaatcagcataagaacaaagagcaggctatttcagccagcgaattttccacacctgtcgcgggtaattattttccttatcagaaacgaaatgaatacttttagtttggcttacgggaaaatattatcggcatcacgaattttaggatttttaataccaaaagtcagttgctaacttcccatgattcatgcaacgtaatcacctgtttatcaaagcagccggtcttcattgctacaggcgtacaacatgcagggatacagagcgggaaatgaatcgtagcgcgctgcgcaacatgctcaaagtggtcgggattatcatggtagttatgctgccggtgatgcttgcgctatggtttgcccagcttagagccgtgtcggaaatcagcgcccagctgcgcacgtttgctgaacttgctttaaacaaaactgaacgggttattcaacaggttgatctggcccgggaagacgcggaaaaatatcagggaaaagtgtgtacgccggagcatcgtcaatatatgttgaacgtttcccgcggtcgtctttttgttgccgatttaatttatgctgaaggccagtcgtttctctgctcgaccctttttacgccggatcatccttacaccattcccgctgccaattacacacgtaaacccgacgttgctatctattattttcgcgatacgccattttttgatggttataaaatgatatatatgcagcgcggaaattatgtcgcagtggtcaacccgctttcgtacagtgaggtgatgtcagacgatcgttccctgtcgtggggggtgtatgacaccgtcagcaatgcattcttttctgtaagccagaaagccaatatttctttattgcattcgatgcttcgacatcaggaaacgacttttcagaaaggtgaccgtttttatacgatcgtgaaatccgggcagcggccgattgcggccatcgtttcaacctccagcgcccgtttttataaaacgctttatcatcaggctaccctgacgctaccgctggggataatttgcagcattattattctgctggtgtggtcgcgtacacaccgtgaattcaattcgcctggccgacttctgcaccgggcgctgaataaacgccagctgtgcgtccattatcagcccattattgatattaaaaataaccagtgcgtgggggcagaggcgttgttgcgctggcctggattcaacggtcaggttatgagcccggcggaatttattcccctggcagaaaaagaggggatgattgagcgcattacggattacgtcgtggaggaggtgttcagcgatctgggccattttcttgccgctcatcccgatctgtatgtctcgattaacctgtcggcgtcggattttcactcttcgcgtcttatcgccctgatctccgacaaagcccgcttttactcggttcgcgcgcagcaaatcaaaattgaggtgacggagcgggggtttattgacgtgccgaaaaccacgccggtcattcaggcgtttcgccaggcggggtatgaagtggcgattgatgatttcggaaccggctactctaacctgcataacctctattcgctgaacgtcgatatcctgaaaatcgacaaatcctttatcgataccttaaccaccaacagcaccagccacctgattgccgagcacatcattgagatggcgcaaagcctgcggctgaaaaccattgcggaaggggtcgagacgggggagcaggtgagctggttactgaagcgtggcgtgcagtattgtcagggatggcacttcgcgaaagcgatgccgccccaggcatttatggcctggcagcagcaacccttgcgttaacacgcattaattgagctgatggcggtagtcgctcggcgtacggtcaaactcgcggcggaagacgcgggaaaaggtctgctgcgacacatagcccagatccattgcgatatcaaaaatgggccgctgcgtggagcgtaacgcctgcgccgccagcaggagcctgcgctggcgaatgtaatcacccagcgtttgatgcattacggtgcggaacattctctgtaaataccatttcgaatagcccgacttcttagcgaccacatcaatgttcaacggctggtcgatatgttcatcaatccattcaataagtgtctgaataatttgctgatgcgacataaggttacccctctgtggagacatctgtcctggttgattcgtcgttttctctgcgggggagtataattcctcaagttaacttgaggtaaagaggttttatggaaaagagattaccgcgcatcaaagcgctgttaacccccggtgaagtggctaagcgaagcggcgtggcggtgtcggcgctccacttctatgaaagcaaagggttaataaaaagtatccgtaacgccggaaaccagcggcgctacacccgcgatgtgctccgctacgtggcgatcattaaaattgcgcaacgtatcggcattcctctggccaccatcggcgacgcgttcggcgtattgccggaagggcactcgctgagcgcgaaggagtggaagcagctgtcgtcccagtggcgagaagaactggatcgtcgtattcatacgctggtggccctgcgagatgagctggacggctgcattggttgcgggtgtttatnnnnnnnnnnnnnnnnnnnnnnnnnnnnnnnnnnnnnnnnnnnnnnnnnnnnnnnnnnnnnnnnnnnnnnnnnnnnnnnnnnnnnnnnnnnnnnnnnnnnnnnnnnnnnnnnnnnnnnnnnnnnnnnnnnnnnnnnnnnnnnnnnnnnnnnnnnnnnnnnnnnnnnnnnnnnnnnnnnnnnnnnnnnnnnnnnnnnnnnnnnnnnnnnnnnnnnnnnnnnnnnnnnnnnnnnnnnnnnnnnnnnnnnnnnnnnnnnnnnnnnnnnnnnnnnnnnnnnnnnnnnnnnnnnnnnnnnnnnnnnnnnnnnnnnnnnnnnnnnnnnnnnnnnnnnnnnnnnnnnnnnnnnnnnnnnnnnnnnnnnnnnnnnnnnnnnnnnnnnnnnnnnggaggattgagaggtgtttgccgggtggcggctgcgccttacccggcctacaaaaccgagagcgtaggccgggtaaggcgcagccgccacccggcaacaagcataaagaactaaagcgccactaagggcgctttagttttttccggtctttgtctttctctctatcccgctggctcacgggagggttttccccgacatcagtacccctcgtgtcgagcttgtggaggaggttccggtttgtactgacactttaattctatgcccggccgccgtttttgccaccggagacggtgagattttagccgaatttttttcgtgaagttgttcagttttctatagttaaaaagtatgaatcaccggagaacatcatgctaacggtccaccaccttaatcagtctcgttcacatcgcgtcctctgggcgctggaagagctgggtctgacgtatgagattgtgcgctaccagcgcgaaaaatccatgcttgcacctgattcgctcaaaaaagtgcatccgctggggaaatccccggtactggaagataacggactggtgctggccgaatcaggcgcgattctggaatatcttcaggaaacctacgattcggcgtcacgattcaaaccgttagatcccacccataaagtgcagtatcgcttctggctgcattacgccgaagggtctctgatgccgctgctgttaatgaagctggtattcaacagcctcggcaaaccacccgtcccgtttggcctgcgcacgctgggtaaggcgctggggcagggggtgcaaaaagcgtatctcaaccgtcagctggaaacgcatgcgcgctttattaacgatcatcttgccgaaaacagctggtttgccggcgacacgctgaccatggctgatatccagatgagttttcccctcttcgccctgctggcgagaggcggcatcgacaatctcgaccacatagcggcgtggaaacagagagtggaggcacgtccgggctggcagacaacgcttgcgaaaggcggcccgctgacaatccccggcgagggatgaaatgtaacgaaattgcgcatggacgataacgtttgcgcatcctctgcttaattcttcatcgtcatgaggcaattttagcgaaaaacgagaaagttcagttgaaaagggcgggtattaggctagataatcgtttgcctacatttgaccacccgttttgtaagcgcggagctaaacgtttgctttttttgtgacgcccctttcgtcgcaaacgcagcacaaggatttgacgtttcgctggcagtggagtctccaccacgcttacggactttcaataaaaattttcaggggatgttttctatgtctacgccatctgcgcgtaccggcggttcacttgacgccatgtttaaaatttctgctcgcggcagcaccgtgcgccaggaagttgttgccggtctgaccacgtttctggcgatggtgtactccgtcatcgtggtgccaggcatgctcggcaaagcgggcttcccgccagcggcggtcttcgttgccacctgcctggttgcgggtgtgggttcgattgtgatgggcctgtgggcgaacctgccgctggcgatcgggtgcgccatctccctgaccgcgtttaccgccttcagcctggtgctgggccagcatatcagcgtcccggtagcgctcggcgccgtgttcctgatgggcgtgctgttcaccgtaatttcagcaaccggcattcgtagctggattttgcgcaacctgccgcagggcgtggcgcacggcaccggcatcggtattggcctgttcctgctgctgatcgctgccaacggcgtgggtctggtcatcaagaacccgctggacggcctgccggttgcgctgggtaacttcgcgagcttcccggtgatcatgtcgctggtgggtctggcggtgatcattggcctggaaaaactgaaagtgccgggcggcattctgctgaccattatcggcgtgtccatcgtcggcctaatcttcgacccgaccgttcatttctccgggattttcgccatgccgtcgctgagcgatgacaacggtaactccctgattggcagcctggatattgtgggcgcgctgaacccggtgatcctgccaagcgtgctggcgctggtaatgaccgcggtgtttgacgccacgggcaccatccgcgcggtggccggtcaggccaacctgctggataaagacggacagattattgacggcggcaaagcgctgaccaccgactccctgagcagcgttttctctggcctggtaggtgcggcgcctgcggcggtgtacattgagtccgcagcgggtacggcggcaggcggtaaaaccggcctgacggccatcaccgttggcgtgctgttcctgctgatcctgttcctctctccgctctcttatctggtgccggcttacgcgaccgcacctgcgctgatgtacgtcggcctgctgatgctgagcaacgtggcgaaaatcgatttcgcggattttgttgatgccatgtcaggcctgatcactgcggtattcatcgtgctgacctgtaacatcgtgaccggcattatgatcggcttcgcctcgctggtgattgggcgtctggtctccggtgagtggcgtaagctgaacatcggtaccgtggtcatcgccgttgcgctggtggcgttctacgcgggcggctgggccatctgaattgactttttatgcgaaaacgggtggctcaggccgcccgtttttattttcaggactcatcctgttgccttttacgttactctggagaggatagaataagaggcacgacgcctcaggtttggcatataagaaacacagcaaacagggaacgcatggaaattttcttcacaatactcatcatgacccttgtggtctcattatccggggtggttacacgcgtactgcccttccaggtccccctgcctttaatgcaaatagctatcggtgcgctgctggcgtggccgacgttcggtctgcacgtggagttcgatccggaactgttcctcgtgctgtttatcccgccgctgctgtttgccgatggctggaaaacgccgacgcgcgaatttctggagcacgggcgagagatcttcggcctggcgctggcgctggtggtggtcaccgtggtcgggattggtttcctgatctactgggccgtaccggggatcccgctcatacccgcctttgcgctggccgccgtgctgtcgcctaccgacgccgtggcgctgtccggcattgtgggcgaagggcgcattccaaagaaaatcatgggcattttgcagggcgaggcgctgatgaacgacgcctctggcctggtcgccctgaagtttgccgtggcggttgccatgggcaccatggtctttaccgtcggcggtgcgaccctggaattcttcaaggtggcgattggcggtatcctcgcgggctttgtggtgagctggctgtacggacgctcgctgcgcttcctcagccgctggggtggcgacgaacccgctacgcagatcgtcctgctgttcctgctgccgtttgcctcttacctgattgccgaacacatcggcgtgtcgggtattctggcggcggtagccgcggggatgaccatcacccgctccggcgttatgcgccgcgcgccgctggcgatgcgcctgcgtgcgaacagtacctgggccatgctcgagtttgtgtttaacggcatggtgttcctgctgttgggtctgcaactgccgggcattatggaatcctcgctgattgcagccgaagcggatccaaacgttgaagtctggatgctgtttaccgatatcgtgctcatctaccttgcgctgatgctggtgcgtttcggctggctgtggacgatgaagaaattcagcgttcgcttcctgaccaaaaagccgatggagttcggctcgtggaccacgcgcgagctgctgattgcctctttcgcgggcgtgcgcggggcgatcacccttgctggtgtgctctccattcctctgctgctgccgacgggtgacgtcttcccggcgcgctacgagctggtgttcctggcggcgggcgtgatcctcttctccctgtttgtcggcgtgattatgctgccgattctgctgcaacatattgacgcaggggactcctcgcaacagcacaaagaagagcggattgcccgtgcggcgacggcggaagtggcgattgtcgccatcgagaagatggaggagcgtctggccgccgatgccgaagagaacattgataaccagctgctgaaggaagtcagttcacgcgtgatcggtaatttgcgtcgccgtgctgacggacgtaacgacgtggaaagttcgttgcaggaagagaacctcgaacgccgtttccgcctggcggcgctgcgctccgagcgtgccgagctgtatcacctgcgcgccacgcggcagatcagcaacgagacgctgcaaaagctgctgcacgatctggatctgctggaagcgttgttgattgagaatcagtagcgctgtaattgcccggtggcgctgcgcttaccgggcctacgtgctcgatcggtaccctctccctgtgggagagggtacccaaaacccctcacagcattgcaaccacgcctgcgcgctgtgcgacagatagaccccttcacgccagatcatccccagctgccagtgcaggtcgctctccagcgggatccagcgcagcgtatttttatccagccgctcgcagatcggctgcggcagaatggcaatccccacgcccgcctgtaccatcgccgccagaaaatcccactgaccgctgcgcaccgcaatgcgcggctttacgttgtgctggttaaacagcgccatcagctggcggcttaaggcgaaatcttcgttgtaaatcagcagcgggtgttcgccgagcagctcgggttttactgactcaatcttcagccagtcgccggagcgcggcaccagcacgcacagcgggtgattgaacagaggcagcgtcgccaggccgctctcctcctccacgggaagggccgtcatggccacgtccagttcaccgttcatcaccgcctgctgcacggtcaggccgccaaattcagaaatttttagctcaacgccgggatagcgctggcgaaacaggcttatcggcccggccatcatcatgccgaccatcggcggaataccgagccgcagcagcccttttgtcagatggttgatgtccccaagctcggcctccagctggcggaactccgccagaattgccagcccgcgctcgaacaccacgcgaccggtatcggtcagcagtagcttgcgtccgtcgcggatcagcagggtacagttcagctcatcttcgaggtttttcagcatcttgctgatggttggctgggtaacgaataacttctccgctgcgcgggtaaaactttgctggcgaaccacctcgacaaaatagcgcagcgttcttatgtccatgattattcctcgaaactataccttcgatgattttaattcatttcagtcgataccgtacgctcactatactggcgcctcgtctcatttctgaggaaaacccccatggccgtggcgttaagccgtgttacgcctgccgttgtgcaacgactccaggtaccggttcaggtactgctttacgcgggactgtttgttttcgcggaatatcttgtcgactggctgcatctgcctttacccgccaacctggtggggatggtgctgctgctgacgctgatcctctgtcgcgcgttgccccttagctgggtgcgggccggcgcacgctggctgctggcggagatgctgttgttctttgtgccggccgtggtggcggtggtgaactatgcccagctgctgatggtcgacggctggcgcatctttgcggttatcgccctgagcacgatgatggtgctgggcgccaccgcctgggtggtggataaagtgtatcgctttgaaatcagcaggcagacgcatgactaactttcagataagcgtgctgtgcctgattgcgacagtcgtcatctactttgccaacaagcgcctgtatcgccgctttcgcgcgctgccgctgatgccgctggtctttacgccgatcctgctggtgctgatgctggtcttcggccatatctcctggcagaactacattggcgaatcccactggctactgtggctgctcggcccggcgaccatcgccttcgccgtacccgtttatgacaacctcgccattatcagacgccactggatgtcactcagcgcgggcgtcgtcaccgcgacggtggtggcggtgtgcagctcggtctggctggcgcggttgtttaccctgtcggatgaaatccagcgcagcctggcggtgcgttcggtgaccacgccgtttgcgctggcagccgccaaaccgctcggcggccagccggatctggtggcgctgtttgtggtggtgacgggcgtgttcggcatggcagtgggggatgtgctgtttctgcggctttccattcgcgaagggatggcgaaaggcgcggggtttggtgcggcgtcgcacggggcggggacggcacgttcgtatgagctgggacagcaggagggcgttgtcgcgagcctggtgatgatgctttcgggcgtcacgatggtgctgattgcgccgctggtggcgtgggtgatgttttaagctccccggccagagcgaccggggagaaaaggcttagtgcgcgcggccctgctcaacgcccaggccggtttgcgagcggataaactgggcgcggaatttttcacgctccaggttaccctccggtgaattatcggtggcagagaagatccagatcccgataaacgccacggcaatggagaacagcgccgggtattcatacgggaagatagcgctttcgtgaccgaggatctgcacccagatggtcgggccgaggatcatcagaatcaccgccgtcagcaggcccagccagccgccaatcatcgccccacgggtggtcagttttgaccagtacatggagagcagaatgatcgggaagttacagcttgccgcaatcgagaaggccagcccgaccataaaggcgatgttctgcttctcgaacaaaatccccagcaggatggcgacgacgcccagcaccagcacggtgattttggagaccttcagctcatcgcgctcgctcgcgcctttgcggaagacgttggcgtaaaggtcatgcgaaaccgccgacgcgccggccagcgtcagccctgcaaccaccgcgaggatggtggcaaaggccacggcagagataaagccgaggaacaggttgccgcccaccgcgtcggccagatgcaccgccgccatgttgttaccgccgataagcgcgcccgccgcgtctttaaacgccgggtttgcccccaccagcatgattgcgccgaagccgatgataaaggtcagaatgtagaagtagcccataaacccggtggcgtagaacacgcttttacgcgcttcacgcgcatctgacaccgtgaagaaacgcatcaggatatgcggcaggccagcggtaccgaacatcaggccgagaccgagcgagagcgcggatatcggatctttcaccagcccgcccgggctcatgatcgcttcccctttcgggtggaccgccatcgcttcggtaaacagattattgaagctgaacccgacgtgcttcatcaccataaaggccataaagctggcgccgaacagcagcagtaccgctttgatgatctgtacccaggtggtggccagcatgccgccgaacaggacgtacatcaccatcagcacgccgaccagcaccaccgcgacgtggtagttcaggccgaacagcagctcgatcagtttgcccgcgcccaccatctgggcgatcagatagagcgccaccaccaccagcgaaccgcaggcggagagggagcgaatcggcccctgcttcaggcgataggaggcgacgtcagcaaaggtatagcgccccaggttacgcaggcgctcggcaatcaggaacagaatgattggccagcccaccaggaagccgagggagtagatcaggccgtcatacccggaggtgtacaccagcgcggagatcccgaggaacgaggcggccgacataaagtcacccgcaatcgccagcccgttctggaagccggtaatgttgccgcccgccgtgtagtaatcgttacgggaacgcacgcgttttgacgcccagtaggtgatatacagcgtcaacaggacgaaaatcaggaacatcacaatcgcctgccagttggttggctgacgctggacctcgccggtaatggcatctgccgcatgggcagcaaagggaagtgtggcggcaagcgccgtcaggactcgcttcatgatgcttttacctcgcgcagaacttctctgttaagacgatcgaattcaccgttcgcacgccagacgtaaacgccggtcagcaagaatgaaatcacaatgacgccaatcccaatcggaataccgcgcgtgacgctggtaccctcatgcagcggggtgcccagccagtgcggcgcaaaggcgatcagcagaataaagccgacgtagataatcagcatgatgatggaaaggatgaaggcaaaccgttgccgtttttcgacgagctccctgtagtgcgcactattctctatctgctgacaaatatcgttattcatcacagagtctccagaagtaaggttggtttgtttttatcccctctcccctgtggggagagggtgaggggaggaaggtgcggtctgatgccctcaccccggccctctcccacggggagagggagaaaacactaggaaggcattgcgatggcctgcttctcttcgagcagtttgtccaccacgccaggatcggccagcgttgaggtatcaccgaggttactggtgtcgcccgccgcgattttgcgcaggatacggcgcataatcttgccggaacgggttttcggcagcgagtcggtccagtgcagcacgtccggcgtggcaagcgggccgatctctttacgcacccagttgcgcacctcggtatacagctctggcgacggctcttcgccgtggttcagagtgacgtaggcgtagatcgcctggcctttgatgttgtgaggaatgccgacaaccgccgcttcggcaattttcggatgcgacaccagcgcagactcaatctccgccgtgcccagacggtggccggagacgttcagcacgtcgtccacgcgtccggtgatccagtaataaccgtcttcatcccggcgcgcgccgtcgccgctgaagtacatgtttttgaaggtcgagaagtaggtctgctcgaagcgctcatggtcgccgaacagggtacgcgcctggccaggccaggaatcgacgatcaccaggttgccttcggtagcgccttcctgcggattgccttcgttgtccaccagcgcaggctgcacgccgaagaacggacgggtggccgaaccggctttcagctgcgtggcgcccggcatcggggtgatcatgaagccgccggtttcggtctgccaccaggtatccatcaccgggcacttctcgttgccgatcttcttccagtaccactcccaggcttcggggttgatcggctcgcccacggagccgaggatacgcagggaagagcggtcggtcccttcgatagctttatctccttctgccatcagcgcgcggatcgccgttggcgcggtgtagagaatgttgacctgatgcttatcaaccacctggcacatacgcgccggggtcggccagttcggtacgccttcaaacatcagcgttgttgcgccgcaggccagcgggccgtacagcaggtagctatgaccggtgacccagcccacgtcggcggtacaccagtagatgtcgcccggatggtagtcgaaaacgtatttaaaggtggtggccgcgtaaaccagatagccgccggtggtatgcagcacgcctttcggcttaccggtggagccggaggtataaagaataaacagcggatcttccgcgttcatctcttcaggctgatgctggtcgctggcgttttcaatcagatcgctccaccacaggtcgcgcccctcgtgccagtcgattttgccgcccgtgcgtttgaagacaatgacgttactgatggatttcacgttcgggtttttcagcgcttcatcaacgtttttcttcagcggaataccgcgcccggcgcgcacgccctcgtcagcggtgatcaccagcttcgaatttgagtcgacaatacgcccggcaaccgcctccggcgagaaaccgccgaagataacggagtggatcgcaccgatgcgcgcgcaggccagcatagccacggcggcttccggcaccattggcatatagatcgccaccacatcgccttttttaatgccctgggccagcagcacgttggcaaagcggcacacgtcgcgatgaagttctttatacgagatgtgtttactctgagaggcatcgtcgccttcccagatgatggccgtttcgttgccgcgttcagcaagatggcggtccaggcagttcgccgccaggttcagcgtgccgtcttcataccatttaatggagacgttgcccggcgcgaaagaggtgttctttaccttctgataaggtttgatccagtcgaggatgtggccctgctcaccccagaacgcgtcagggctggaaacggactgctggtatttctcctggtattgctccgggcttatcaggcaacggtccgcaatgtttgcgggaatgtcgtgtttgtgtatttggctcatggctttttttctccttgtaagatgttaataatatgtcgcaaaaacgttaatagtaggggctttacaagctttgtttagtatttgggcgacagatcacgcaatgtctgaagagtatgaaaattgagcgaatgaaactttgaagggaaataattcacctgaagaattattcacttttttgaagtgaaaatattttgtataacaaatggttatttatgcgaattgctataaattgccgtcaatgacactttttgcagtgaaatgccttgttctttaaggcttgcgcagcatgccgtgcaaatgatactcatacggcgcgttaaaaaatcccataaaccaacgcaacacaattcataccctttcagtatgtctccatattcatgcagttttgatggtacggagatttcattgaggaagtcagtttctatgaaaaatttgaaagtcagcctggcctggcagatcctgctggcccttgtgctgggcatcttgctgggcagttacctccattatcatagcgacagccgcgagtggctgattgcgaaccttctctcccctgcgggcgatatctttattcatctgatcaagatgattgttgtgccgattgtgatctcgacgctggtggtcggtatcgcgggtgtcggtgatgcgaaacagttaggccgcatcggcgttaaaactattctctatttcgaagtgatcaccacggttgccatcgttcttggcatcaccctggcgaatgtgttccagcctggtgccgggatcgatatgtcgcagctggcgacggtggatatttcgaaataccaaagcacaaccgccgatgtgcagagccattcgcatggactgatggggactattctctcgctggtgccgaccaacattatcgcgtccatggcgaagggcgagatgctgccgatcatcttcttctcggtactctttggtctggggctttcttccctgcctgcgacgcaccgtgaaccgctggtcaccgtgttccgatctgtctccgaaaccatgttcaaagtcacccacatggtgatgcgttatgcgccggtcggggtattcgcgctgattgcggtgaccgtagcgaacttcggctttgcctccctgtggccgctggcgaagctggtgattctggtgcacttcgcgattctgttcttcgcgctggtagtgctgggcattgtggcgcgcctgtgcgggctcagcatctggatcctgatccgcatcctgaaggatgagctgattctggcctactccacggcaagctccgagagcgtactgccgcgtatcattgagaagatggaggcctacggtgcgccggcgtccattaccagcttcgtggtgccaacgggttactcctttaacctggatggttcgacgctgtatcagagtattgcggcaatctttatcgcgcagctgtacggcattgacctgtcgctgtggcaggagatcgtgctggttctgacgctgatggtgacttcaaaaggcatcgcaggcgtgccgggcgtctccttcgtggtgctgctggcgacgctgggcagcgtcggtattccgctggaaggcctggcgtttattgccggtgtggaccgtatcctagacatggcgcgtactgcgctgaacgtggtgggtaatgcgctggcggtgctggtaatctccaagtgggaacacaagttcgaccgtaaaaaagcgctggcgtatgaacgcgaggtgctgggtcgttttgataaaacggctgaccagtaacattctaagcccggtggcgctgcgcttaccgggcctacgggttttgtaggccgggtaaggcgaagccgccacccggcacgttactccccgctcaacgcatcaaactcttcacacccggtatcaaacccttcggtacagctcaggtttaaccagtaaagcgctttctgtttattcggtgtgataaagcctttctcaccctgcctgaacagcattcctgcccagtactccgcatagcccgtccgggacagagccgaactccgcttgaaccacgacgcggcctgcacgtcatcctgagggacttcaacgccgttggcatagatcagccccagcagctgttgcgcgtctaccgccgagtcgctatcgatgtcttcggtcgccgattgcagcagtgcgatggcctgcgggtagtcggttttgcccgcctgcgtgttcaccagcacccgcgccagcatgatcgcgccgcgtttgctgcccgcaatgtttgcctgctgggccagggctttagcctgcgcatagtcaccctgcgaaaagtggatttgcgacagcagcgccatggcgtcgacatcaccgccttttgccgctttttccgcccacagcgccgcctgcgcgctgtcaccggaactgaaccaggtatcggcaagataatactgcgcgcgcgcatcgcccgcttcagcctgctttttatactggctgcctatctcatcggcatgggcaaacgcggttaaaaataacaacatcagaaaaagggttttcatggattcttatcatctgggtacacgccgcgcagtataatcgcggcgacagaagaaaaaaacgggtgcgttaagacctcagcatcccacaagccgggcggaacacgcgttccgcccgaagaggttagcctgcgttacaggctaatttcgccgccacctcctgatgttcactctttattgaaaactcacataacttatcgcgagtaataaaggtaaagatcactatcgtcaggcaaataataaagacgatgcctaacgtagtttttaatggcgtcatgccttttactccttgtgaaaaaaagaataagaggctactctcaacctgttggttgttgaggggtagcctcgggtaaatgcaaatttcccggggctttccactttctgtccctcaacaatgctcaagacagaaagtcttaagcacccgccgcatatcttatctcgctgaattaaaatgcaaagatgtaattaattttcgtgcaaattacattttttctgcgagacatcttcagaaatatatatagatgtaattaatagcgatgccagaaataataatggggtgaatatctcaccccatttagtcagcgattaattaacggcttcatcccattgcgctttcgcgcaggcgggctttcagcttgttatattcgtcgatcacatactgttccgcagcgtgttgatccgctattggctccacgtttacggcgcagtatttatactccggcgttttggttatcgggcttaagttctccgtcaccagctcgttacaggcgccaatccaccactggtaggtcatatagactgcccctttgtttggacggtcgctgacctgcgcgcgggtaatgatgcggcctttacgcgagttcacccacaccagcgcttcatcttcaataccgagacgttcggcatcggcggtgttgatctgcgcgtagcccggttcatccgccagcgccgccagcgcggcgcagttgccggtcatggagcggcaggagtagtggcccacttcacgcacggtggagagcaccatcggatactcgtcggtgagcttatcgatcggcgcgacccagtcgcaggtgaagaactgcgccagcccgttcggggtgtcgaacttctctttaaagaggtatgacgtcccctgatcggattctgactcatcccggcacggccactggatgtagcccagctcacccattttttcataggttgccccataaaagtccggacacagatgccgcaactcgtcccagatctcctgggtgttgttgtagtgcatcgggtagcccatgcgggtggcgatttcgctgatgatttgccagtctgttttcagatcccacttcggctcgacggccttgaagaagcgctggaagccgcggtctgccgccgtatagacaccttcatgctcgccccaggaggtcgacggcagaatcacatccgccgccgccgcggttttggtcataaagatatcctggacaatcaccagctccagatcctcaaagcctttgcgcaccgcagacagttcggcgtcggtctggagcggatcttcacccatgatgtaggccgcacgtacttcaccgtgcgccgcgcggtgcggcagctcgctgatgcggtatccggtgtgtgccggcagactttccacgccccaggccttcgcaaacttctcgcggttttccgggaacttcacgtactggtagcccggataggtgtccggcagcgcgcccatatcacacgcaccctgcacgttattctgaccacgcaccgggttcacgcccacatgcgctttacccagattgccggtcagcatggcgaggctggtgagcgagcgcacggtttccacaccctggtagaactgagtcacgcccatgccccacagaatggcggcggttttcgctccggcgtacatccgcgccgcctggcggatctcctgcgcgctgacgccggttatcgcctctactgactccggcgtatagccttcgacaatcttgcgatactcttcaaacccttccgtacggctcgcgacaaacgcctggtcgtagaggttctcctcaataatgacatgccccatcgcattcaacagcgcgatgttcgagccgtttttcagtgcgatgtgcatatccgcaatgcgcgcggtttcaattttacgcggatcgcagacgatgattttcgccccgttctgtttggcgcgaataacgtgattcgcgacgatagggtgagaatccgccgggttatagccgaagatgaacaccagatcggtgttatctatctcattgatggcattactcattgcgccgttaccgaccgactggtgcagacctgcaaccgatgggccgtgtcagacgcgagcgcagcagtcgacgttattggtaccaataacggcgcgcgcgaatttttgcatcacatagttggtttcattcccggttccgcgtgaggagccggtggtctgaatcgcatccgggccatacttggccttgatggcgctgaggcgcgtggcgacgtaatccagcgcttcattccaggagacggcttccagcttgccgccgcgctcgcggcggatcataggggttttcaggcgcggcgtgaggatttgggtatcgttaataaaatcccagccgtagtaccctttcaggcacagcgtgccctgattggttttaccctgcgccgcttccgcccggacgattttgccgttatcgaccaccaggtggatcttgcaacctgaggcacaataagggcaaaccgtgacgacttttttcatcactttgctccagttaaacagttcttacctgcccaatatgcagcttctatgccatgtttttactatgggtatttcctgactttacgaccctttgcggggcaaaaccctgacgaaaaacagccaatcgtcaaaattgacgtgtcgaaagggcaggggatgtgacatggattgaatttccgtcacgtaaaaaacaattcggctggagccagcggcagaatggttcagacttaacataatcccctgacggaagcatgcgatgaaaccggcgattctggtggttgatgatgatgtcgcagtctgcgaactgctacaggatgtgctcagcgagcacgtctttaccgtgctgacgtgtcacaccggtcaggacgcggtgaaccgtgtccagcaggaccctggcattgcgctggttctgctggacatgatgctgccggatatcaacggattacaggttttgctgcaactgcaaaagcagcgaccatcgctaccggtggtgatgctgacggggctgggaagtgaatcagatgtggtcgtcgggctggaaatgggcgccgatgattacatcggaaaaccgttcaatccgcgcgtggtggtcgcccgcgttaaggcggtgctgcgtcgaaccggcgcgctggacgcggagcctgccgcgccgcgcgttgaaggtattacctttaacggctggacgctggacaccacccgctgcgagctgagcgatccgcagcgtaataccgtgccattaacccagggcgaatacggcctgctgctggcattaacgcaaaacgcccgccgggtactgagccgtgaacagctgctggagctgacccacagcgaaagcgccgaggtctttgaccgcactatcgacgtgttgatcatgcggctacggcgaaaaattgaggtcaatccgcaccagcctttgctgatcaaaaccattcgcggtctgggctatgtttttgccacggacgtttcccatcatgagaaagccgcctgaccgttctcctgaataaacgcctgaagctcggccagcgttttcgcgccgtcaatcgcattggccgccagcaggctggcccgcgcgcaggcgtgcgccagataaatactctcggtaagcgacagcgattcatggcaaccgtataaaaagcctgcgcaaaacgcgtcgcccgcaccgacgctgccgataatctcgtcctgcgtcagcttccacgaaggaacccattgccctttttcacccggcgcttcaccccatgccccttccggacagtggatcactacccgctgccgcacgcctgccgccagcaactgtgcggcagcgtcggcgatatggaccatgttcagcgcaccatgaccgtcgcggatctcaagcccgctaaactcaccggcttccagctcgttaatcaccatataatcaagatgacgcagggcagggagcaccagcggctgatagcgcggatcgcccttgcgggagaccagatcgagcgaggtttcatacccctgatcgcgcatctgtgccagtaaccgcgcgctgcgggtgccaaactcctcgtccggcatgtccaggctgtcgagcagcagcagatagccgagatggaagatcttcagcgatccgtctaaacgatcgaaggcgggaagatccagcaggcggttggcgcccggcgagtggaaaaaggtgcgctgtccgctggggtcggtcattacctgcgacatcgacgttggggcgaacgtcgtgcgctgcacgcgctggcgattgacgtgatactggtcgagcatcgccagaatatagtctccgtcgctgtcttccccaatcagccccaccgcctgtaacggcaggccgacgtgcattttcgccagcgtcagcagaacgttgagcggcgcaccgccggttgagcgctcactgtgggtgatttccgccagccagccgcgctccggccactgcacgatctgatgaacgtgatccaccagcatgttgcctgcggcgataatccctttgcgttccattatgcctgccccgcgctgccgaagatgcgcatctgctccgcgaccgtatcggtaatggcctcttcaatgcccagcagcagttcggcaaactcatcgtacagcggctggcggtttgccatgcgctgctcaacggcggcgagcgcggcctgcgacatgccggtatagaagttgattttatgaatgcccagctcgatggcgcggcggaagtcggcatcgctgatgccagagccgccgtgtaacaccagcggcaggcccgtctgctggcgaatggcgtccagacgggggaaatcaagcttcggctcgcccttgtatttcccgtgcgcgttgccaatggcgaccgccagcgcatcgatgccggttgaatcaacaaactcgcgcgccagctgtgggtcggtaaagaacgcttcgtccgcatgcccgtacagcgcgccgccttcatctccgccgactgcgcccagctccgcctccaccgagacgcccaccgcgtggcacatcttcaccacttcccgggtctggcggatattttcctcatagctcagcgtcgagccgtcgaacatcaccgagctgaaccctaagcgcagggcgcgcacgacggcctcaaaatgcaggccatggtcgaggttaagcaccacgggaatattgtgacgggcggcttcgaacttcaccgcttccaccagtgactccagagacacgtacttaaaatgcacttccgcgatgttgatgataaacggcgaacgttcctgcttcgcggcggcaaacagcgcgcgcagaaaatgggagtcgagaacgttgaacgcgcccagggcgtagcggtgttctctggcgtgtgccagaccgtcggcaagagaaatcaatggcatcattcactccttatatccgaaacagggtgtactcgttgcacagcaccagcaccgccggttcgtcttcttcgatggtgttatagcgatcgatgggctgtaaaaagtggttgtcgtgttcatcgtcattgaccgacgacacttcgcccaccagcacgtcgccaaagccgcgttcaccccagaaactgtggtacaggccgggcgtcaggcagatgctctcccctggcgtgaggcgcagctggctgccgggcgcgtgcgtctgccgacagccgtctatcgtgacgatcacgtcggtgttttcggtctcttcatgcgcgcccgcattccataactcaataatcagatttccgccgccgcggttgatgatgtcctcccgcttgcgccagtggaaatgcatcggcgtcacctggccgtcgcggacgtgcatgattttttcggcatagcacttttcataaggtacgccgttgggggagccgttgcgcagggtgaacagcgtcagcccctgtgcggcaaaattgttaccgccaaacgccgtcacgtcccagccgagcctgaggtcgaacacctcctgccaggtggcctggtcaagctgctgccattttgttggcggaaagctggcaaacggcgggagatgcacgtcgtgcatggagaagaactgccgcgtgtggccgagtatttcattgatgtcggagcgtttcatggggactccttaagttttttgtccgnnnnnnnnnnnnnnnnnnnnnnnnnnnnnnnnnnnnnnnnnnnnnnnnnnnnnnnnnnnnnnnnnnnnnnnnnnnnnnnnnnnnnnnnnnnnnnnnnnnnnnnnnnnnnnnnnnnnnnnnnnnnnnnnnnnnnnnnnnnnnnnnnnnnnnnnnnnnnnnnnnnnnnnnnnnnnnnnnnnnnnnnnnnnnnnnnnnnnnnnnnnnnnnnnnnnnnnnnnnnnnnnnnnnnnnnnnnnnnnnnnnnnnnnnnnnnnnnnnnnnnnnnnnnnnnnnnnnnnnnnnnnnnnnnnnnnnnnnnnnnnnnnnnnnnnnnnnnnnnnnnnnnnnnnnnnnnnnnnnnnnnnnnnnnnnnnnnnnnnnnnnnnnnnnnnnnnnnnnnnnnnnnnnnnnnnnnnnnnnnnnnnnnnnnnnnnnnnnnnnnnnnnnnnnnnnnnnnnnnnnnnnnnncatcaggccgcaccgggtttacttaaccgtccaccccttatacgtgccgacgttctttttatcgatcatcgtcaccgggatcagcacaggctctttcggcgcaggtttgccctgaagaatgtcatagccgatctccaccgccttcgccgccatcacctgcggatcctgcgccggcgtcgccacaaacagggagttttcgcgcttcagagcttcttcaccgtccgggctgccatccacgccaacgataaagaactcattacgttgagcctgtttcgccgccagatcggcaccgatcgccgtcggatcgttaattgcgaatacgccgtcgatcttcggattggccgccagcagggaggtcatgacctccagtccgccttcgcggctgcctttggcgttctgattatccgaaagcactttgatatccgggtggcgcctgaactcggtctggcagccctccacgcggttttgtaccgcagaaaccggcggcccgttgatgatcaccacgttgcctttacctttcaggcggtcggttatgtacttacaggccatctcccccgcctgggtgttatcggaggtgatggtcgcatcagccccttccgccgccacgtcaaccgccacgaccacgatccctgcctctttggcgcgttttaccgccgggccgatccctttggaatccgcggcgttgaggatgatcatgtccactttcgccgcaatgaagttatcgatctgcgacacctgctggcccagatcgtacccgctggagaccagcgtcaccttgacgttatctcccgccagcttgcgcgcttccagctcggcacctttggtgatctgcacgaagaacgggttagccaggtcgcccaccgtcacgccgatggacttcagatcttttgcctgcgcaaacggggttgcggccagcagcgcgccagcacagagcgcggtcactaagggcttcaatctcatgctgtattcctcacgtagggtattgttgttatgcactttgatggtgtcgggtacggtatttgtcgatcagcaccgctatgatgatcaccgcccctttgatcaccagctgccagaagtaggagacgcccatcagcgtcatgccgttgttgagggtggcgatgatcaatgcaccgaccagcgtgccggtgatcgtgccgatcccgccgacgaagctggttccgccgaggatcaccgccgcaatcgcatccagctcgtaccccgtgccgaggttgccgttggcgctgtagaggcgcgaggcgctcatcacgccgcctaatcccgagagcaggccgctcatgccgtagacaaacagcagcaccagccagaccttgatgccggttaagcgtgccgcctgcatattgccgccgaccgcatagatgtgaacgccgagggttgtgcgacgcagaataaaccagcacaccacaatcaccgccagggcgatcaccaccagccacggaatcgggccgaggtagttgttgccgatccactcgaagttaatgttggagttaatgaccgtcgtgccgtccgccagcagatacgccgcgccgcgcagtgccgtataggtgccgagggtgacgataaacggcggcagcccggcaaaggccaccagcgcgccgttgaacagccccagcaccataccgagcatcagcgccgccggaatggagagcatcgcaaattcagggataagcgagaccaccatcgccgctaccgccgtagtacccagaatcgagcccacagagaggtcaatcccgccggtcaggatgatgaaggtcatccccgccgccagcacgatgttgatcgacgcctgccgggtaatattcagcaggttgctctcggtgaaaaagttcggggcgataaagccaaataccgccacaatcaggataagaatcggcaggataccgaccgtttgcatcagatcgctcatcagcatttttttggcggaggcggatttcgccacctgctgcggatgggtaggagttgtcatgattgcaccgcctgatgatgagtgtcgttcacgccggttgccagcgtcataatgttttcctgagagatgtcgcgcccgtgcagttcacccgcgatgctgccttcgcgcatcacgtacacccggtcgctcatgcccaccacttccggcagctcgctggagatcatcagaatcgccacccctttgcgcgccatctggttcatgatgcggtagatctcgcttttcgcgccgacgtccaccccgcgcgtgggctcgtccagaatcagaatgcgcgggccaatcgccacccagcgggagatcagcagcttttgctggttgccgccggagagcccgcccgcgcgcacctgagaatgcggcacgcggatattgagcagggcgatggcgtcatcggaaatagactgcgcttttttgcggttcagccagccgaaggtggcgtcgcgctccagcgtcgccatggtgatgttctcctgcgccgccagctccagaaacagcccctgctccttgcggttctcggtaagaaaaccgatgccgttttcaatggccgcgcgcggggagtggatcaccaccggctcgccgtcgacctcgatcatgccgcccgtggctttacgcacgccgaagatcagctgcgccagctcggagcgtccggccccgaccagccccgccagcccgacgatttcaccggagcgaacctgcaaactgcacggcagcacttttttgccatctgtcaggtggtgcacgttcagacgcgggctgccgagcggaatatcgcgctctttgttaaacagatcgcttaacggacggcccaccatcatgcgcaccagctcagaggcattcagcttgtcgcgcgtcaggctgccgacgtactgcccgtcgcgcaggacgctgacgcgatcggaaagctcatacacttccgccatgcggtggctgatgtagataatcgccatcccttcatcgcgcaggcgcaaaatcagttcgaacagacggtgggtttcgcgcgaggagagggcggcggtgggttcatccatcaccagaatacggctgttgcggtgcagcgcgcgggcgatctccacctgctgttgctcggcgatggtcagcttcatgaccaggtcggtggcgctgaactgcgcgcccagacggtcaatgaccgcctgcgcctgggctgccatctctttgcgctggaccagcccgccgcgcgacagctcgctgccgagaaaaatgttttccgccacggtcaggttaggagcaagctgcatctcctgataaatcagggtaatgcctgcggccagcgcatccttcggacctttgatgtgaaacggctgaccgtcgatgaggatgtcgccgctgctggcggtataagcgcctgcgaggatcttcatcagcgtgctttttccggcgccgttttcccccatcagcgcgtggatctctccggggaaaaccgtcaaatccacacccttgagcgcgtggaaattgccaaacgtcttggcaatgtggcgcatctctaaaaccggggttctgctcatggcggatctcctgtgaatgtcgatatctgcacttcatcacaggtgcgtaaatgcaaaatgtcagaagctgttcatatttgtcatagttatgaatagctaatcgccatcacattttccttttccctctccctgtgggagagggccagggtgagggcaccaaaccgcagaggagcccaaacccatgtcttcacgccccccgttcttcaccagcgcccgcggtcgcctgctgatatttaacctgctggtggtggcggtaacgctgatggtaagcggcgtggcggtgctcggctttcgtcatgccagccagatccaggagcaggtgcagcagcaaacgctggatgatatgactggcagcatgaacctcgcgcgtgataccgcgaatgtggcgacggcggcggtgcggctgtcgcaggtagtcggtgcgctggagtacaaaggcgaagctgaacggctgaaacagacgcagatggcgctgcgccactcgctggagcagcttgccgatgcgccgctggcgcagcaggaaccggcgctggtggcgcgtattatccgcaggagcaatgagttacagcagagcgtgacgggaatgctggagcgcgggcaaaaacggcatctggagcgtaacgcgctgctcagcgcgctgtatcaaagccaaagctacctgcgtcatttgcaggatatcaaccgccgttacgcgagcaatgtgccagacgcccggcagcttgcagagatggacaggctgatcgttgccgccattgataccccttcaccgcgcgccacggtgcagcagctggatgcagtaaccgcgatgttacccgcgagcgccctgcaaccggtggtcaacctggtgctcccggattttaatgatgagctgcgcaagctcgcgccactgtcaaagcagctggaggagagcgatctgtccatcagctggtacatgttccacatcaaggcgctggtggcgatattaaaccgcgacatcaatcagtacgttgaacaggtggcgcaggcctcccggctgcgtaccgcccaaagccaccaggagctgcgctccatcagcgtgtttatcagcgtcttcgcggtgctggcgctgatcatcaccggctgcgcctgctggtatatttaccgcaatctgggctccaacctgacggctatctcaagggcaatgtcgcgcctcgctcacggcgagcaggatgtgtcggtgcccgcgctacagcggcgtgatgagctgggggaactggcgcgcgcgtttaacgtttttgcccgcaataccgcttcgctggagcacaccacgcggctactgaaggagaagacctcgcagatggaggtcgaccgcatcgaacgtcaggggctggaggaggcgctgctgcacagccagaaaatgaaggcggttgggcaactgacgggcgggctggcgcatgattttaataacctgctggcggtgattatcggcagtctggagctgaccgattcagcgtcaccggacgcgccgcgcatcactcgtgcgctcaaagccgcggaacgcggggccatgctcacccagcgtctgctggccttctcgcgcaagcaatccctgcaacctcatgcggtagagatgaagccgctgctggagaacctgagcgagctgatgcggcactcgcttcccgccacgctgacgctggatattgaagcgcaaaccccggcctggcccgcatggattgacgtcagccagctggaaaacgccattatcaacctggtaatgaacgcccgtgatgcaatggaggggcaaaatggtgtaatcaaaatccgcacctggaaccagcgtgtgacccgcagcgacgggcgcaggcaggatatggtcgcgctggaggtgattgaccacggctgcgggatgtcgcaggaggtgaaatcgcaggtctttgaaccgttcttcaccaccaaacagaccggcagcggcagcgggttagggctgtcgatggtgtacggctttgtgcgtcagtccggggggcgcgttgagatcgaaagcgcgccggggcagggaaccaccgtgcggctccagctgccgcgctcgacgctgcccgcgttctccgatgatgccgcgctggcgaccacggccccggcagagagtgagctgcttgtgctggtcctggaagatgaggcgggcgtgcggcagacactgtgcgagcaactgcaccagcttggctacctgacgcttgaagccgaaaacggcgagcaggcgctgaacatgctggacgcatcgccggatatcggcatgtttatcagcgacctgatgttgccgggcggcctgagcggcgcggaggtgatcggccatgtacgcagccactatccgcagttgccggtgctgctgatcagcgggcaggatttgcgcccggcgcataacccgcagctgccggacgttcagttactgcgaaaaccgttcacccgcgcacagctggcgcaggcgctgcgcaaggtgatggcaggaaccggcagcgagccagggtagcggccccctgagcgccgttaaaagacgacgacgaggcagggataaatttcacggactcatgcggcagcgggcggcgcaaatgctgctttatcccgacaatcagcgcttcgcgcggaaagccaggcatatccattacgccgccaccgaggatcaccgcatccggatcgaacagatttacactggtggcaatggcgcgggctgcatgattcaggagttgttgtacgaaggggtcatcgggtacggctgaaaagatatctcccatcgcatactcgcggggctgctgttcgtaccactgtttcaatgcgataccggaacaaactgtttccagacatcccgggttgccacaaccacagtgccgcgtcatatccccctgtggaatatgcccgagctcgcccgctacgccgtgcgcgcccgtccatggagcaccgtttagccagatggcaaatcccatgccggtgccaagataggccgccagaacctcttgctgctggagattgtgttgcgccacgtcaaacgaaagctgaaggttaacgtcgcgggaaaattcgaccgggcagcctagcgcatcttcaagttttcccgccagatcgcggagctcattcgcctgcaaaggcagatttggcgtcgagataatggtgcgtttgtctttgccgaccagtgccggaaagcccatgaccagaccgcgacagtgaacctgtaaatgacgcagctgagccgtgatcatttccgtcacgccgcacaccacaccagagcggataacctccgcggtgcgctgtttttcacaatgcaacaccgcaccgtcggccgtttgcaggcaaaaacggatatgagtggcccccatatccactccggcgacgacatcaggctgtttttgcatgaggaacaacctcgtttcgtgccgacaggatctgcccggccataagctgccatgcatccccgatattctctgcatggttgaacagaccagacgttccgacgataaagacatctgcgccggcggccatcagttttttataggtggcctgattgcatgagccatcgatctcaatctcatagctcagcccttcgcgttcgcgccaggctttcagctcggcaattttctccagcatttccggaatgaacggctgcccggcaaagcctggatcgacggtcatcacggtgattttgtccgccttatgaatatagtatttcattgcctcaaccggggtttccgggttgaggatgagtcccaccttcataccgtgacgacggatctcttcaatcaggcggaaagcctgaccgttgatggtctccgggtgcagtgtgatgaagtctgctccggcctgcgccagctggcttatgtagtcctgcgggcgagtcaccatcaggtgacagtccagtggtttggtggcgagcttcttcacctggccgacaaagaacggagacagcgtcagattaggcacaaagtggccgtccatgatgtcgatatggaagtagtccgcgtgctggtcaataaattcgatctgttctttgaatttcagcagatccatacacatcagggagggtgaaattttcatagtgatttccttacttactgatcaatctgtcgagggcaacagcggcgataatcaacccgcccattaccaccagctggtagtaggtttgtacctgtaagatattgagtccgttattgatggtgccgatgatgagaccaccaatcacgaccgagaagatgcggcctttaccgccgaagaagctggttccgccgatgatggcgctggcgatggcgtatgtttcaaatcccatcccggccagcggctccgctgcgcccagacgcgcagtcgacaccacgcccgccagcccggcgcatacgccagaaataatgaacaccaccagaatatgaaacttcacgtcgatgccggagtagaacgccgagtttttgttaccgcccagggcgtagatattgcgccctagccgcatacgggtggtgaggaaccagaggatcaccgcgacgatcagcgagaagatgaccggtacgggtatcccgaggacgctggcagcgaagaagtttacaaagtcgaacgagaagccatagacggaattagcgtcggaaatcaccagcgtgatgccgcgaaaaatggcgttagtaccgagagtgataatgaacggatgtagcccggtccagttgaccagacagccattgatcgcccccagcgcgccgccgaccagtacgccgccaatcagtgctgcaaaaaacgggtcgacaccagccagcatcagtttggcagtcaccatgccggagagtgccagaatggctccgacggacagatcaatacccgcgacaaggatggcaaagaattcgcccatcccgatcagcaccgttaccgagctctggacaaaaatctgcgtgatgttgttggtggtgaggaagtactccgatgacagcgtgccaaagatggcgactataatcgcgaggataaaaaaggtaccgtacttgtcccagaacagcgcgaagttaaatggctttttctccgccatatcgcctttcactcttgtggtaatgcccatgccatgatctcctcttcgctcatgtcgtcgcgattggtcaggatttgcgtcagccgcccttcgcagaacacggcgatgcggtcgcagacggcgataatttcaggtaattcagatgacaccatcaggatgaccttgccttcgtcagccagctggcgcatcaccttgtagatttcggcctttgcgccgacgtcgatgcctcgcgtgggttcatcaaaaatgatgacgtccgggttgcaacacagccatttagaaatcagcaccttttgctgattgccgccggagagttcggtgatgttttgctctacgctttggcacttcaacgccagcaactggcgctgtgcttcggcggtcttgcgttcttcatgctcgcgaaagagccccatggcccctttatagccaccgtttttcaggctctggctgacggccatgttttgggcgatagagaaattagggaaaaagccattttcgcggcggctttcggtgatgtaggccatcccttttttcaacgcatccagaggcgaacgcggggagatggttttgccgttgaggcgaatttcaccgctcgcgcgtttatccacgccgaagagacagtccatcagttcggtacgtcccgagccgaccagacccgcaaaacccagtatttcgccgcggttcacgctgaacgaaatatctcgcacttttttcttgtcccggctggtgacgttgttcacctcaaacaccgtgtcgcgttcgatgttgccggtgctctctttcatggcgttaaagcggttttgcagttcgcggccgaccatcaggcgcacaatgtcgtcgtttgaaacgtcactcaccaggccactgcatacgctggaaccgtctttcattaccgtgtagcggtcgcagatgcggcggatttccgctagcttatgcgagatatagacaatggcggtgccttctttacgcagctgattcatgatcaagaaaagataatccacctctttattggttaatgaagatgtgggttcatccataatgatcactttggcatcgagcattaaggttttcgcgatttccagcatctgtttatggctgatggataaattcgctactttttcatctaaatcgacttttaatccgacgcgtaagagcatcatcgcaccgcgaatgcgcatctctttccagtcaataatcctgatgccacaaacctttttagtcaggtgacggcctatatatagattttccagcacggttaattcatcaataacgctgagttcctgatatataatgccgatgcccagtcttgctgccagtttatgatccaatttgtcgtaattcttttcattaataataatggagcctttggtcggttcatgaattcccgacaatactttcattaaggttgatttaccggcaccattttcccctaataacgcgtggatctcatgagggtatatagttaaatcaaccgattttaatgcgtgaaccggaccaaaggatttgccgatccccgccatcgagatatatggcgtgaccatgtttatttccttctctgttcaccctctccctgtgggagagggccggagtgagggcatcaagccgcacagttctgcgttattttgtcaccagaatcgaatccaccaacttgaattcaggcgttttttccagcgggatgactttcccggttttcgcggcatccaccattaatttcaggccggtcgccccgatgtccgccgggttttgtgcgacggttgccgtcatctgaccggcttcgaccatcttacgcgcctctgggataccatcggtgccgaccaccagcactttgccgattttaccggcgtttgccaccgcctgtgccacgcccatcgccatggtatcgttcgcgcagtagaaggctttcagattcgggtttcgttgcagcacgttggttgccacatccagagctttaatgcgatcccagtcagcgggctggctggcaaccagcttaatttggtttgcttttttgaaggcttctgttgcgccattgcggcgcgcctcgcccgatgcgttaccggctttaccctcaatgattgcgacttcgcccccctccgcaccaagtttattgataataaaatcggccccttttgcgccgacggccacgttgtccgttgtgacaaacccctctacattgccacctgcttttttcaggttatccatatcgattttttcatcgagattcaccagatagagacctttctgccaggcgcgcgcgacgggcatgaccagattcacggaggagagtggggcaaaagcgatacccttgtattttttattactcagatcttcgaacagctgtagctgggactgaaaatccccttctgacggcgaggcaaaaatatcaacgcttactcccagggttttggcttcatcttcaatccctttcttcatatccacccagaatggattggagagcgtttttaataccaccgcatattccgcagcagcaaacgcgctggtggataacattaagcccatagcggcgccgctgaaatatttcagatatttattcatagcagtgttctcaatgtagggtatgttgttgttaatcccgcctgagcaggattaaccttttaatttacttcagtgcgccaggagagaagaaatccacaatagcgccggttttttgcatattaagtgtggcctgttcgatattttgttgtgcaacggaaacaaataacgcatctaataatgtaagctgtaatatacgcgcggaggcgttgcgccctaataacggggtctctggtgctggcgaacaaataatataatcagcaagtttagcaatcggcgaatggtagctatgggtaatacagataattttggcgccgttcttttttgctaactcaactgctgctttcacatcactggtgcggccggaatgggagaccaccagtaccacatccccttccttcagcagcgatgccgacatcatcataatgtgcgcgtcctgatacgactggcagcgcacgccgatgcgtagaaacttatgctggatgtcggcgcaaatagcgttagaaccacccacaccgtacagatcgcgctggttggcctgggcgaagaaacgtgccgcgcggtgaatttcatccacgttcactatcgactggccttccataatggtgcgcagcgtaatattgaacactttgttaaccacatcctgtggtgcttcatcaaaagcgagttccgcaggtaatacttgttcggattgcgagaagtagtcgaccagcgccgcacgcaggttacggaaaccgctaaagccgagcagtttggccactttcacgatcatcgcttccgacaccatcagcgtttcggcaacgtctttaatcgcaggcgcgccgctcaggttacccggctggagcagccagtcgacgatacggctttcgttgtcggtcatgccttcctgcttcatgcgcaggtacggtgcaaggccaatgccgttaggcagctcttttttaaattctgactgactcatcgctctcttttgtccttaaaaatgaagacgacactatatcaccacactctggcatgaaaatatgctggcaacttcacaatgtttgaaaattcataaagttttattgtctgtgaagttttgatgggcggttgctttaggatgaccttaaaaatcaataatataattatgacacgttaacggattttaatgcatgccgtaagaaatataccgtcatgagagagttgaaatgtcaaagtcaggggtgtagaacacgcgcagaactcgatggttttgaggttttattgcacaactgaccggtcttaaatcacaactccatcgagttcgtaaagttaacccacgatgaggtttattatgaaaaagattgcatttggctgcgatcacgtaggttttatgctgaaagaggatattctggcccatctgtgcgcgcgtggcatcgacgtggtggataagggcacctgttccccggagcgtactgactacccgtattatgccagcgcggttgcacaggctattatcgataaggaggtggatggcggcatcctgatctgcggaacgggggtagggatctccattacggccaataagttcccgggcatccgcgcagtggtctgtagcgaaccttattcagctcagctttcaaggcagcataacaacacgaatgtgctggcatttggttcgcgcgtggtcggactggagctggcaaaaatgatcgtcgatgcctggctaaatgcaccgtttgaagggggacgacatcaggcgcgagtcgatgcgataggggcgattgaacaggccaggaattgagattcctccgctaccccggttccctgccattcattaccgtaaggccagttcacctgcgagtctggccttatgaaacgttactctaccgctctgttattgggtctgctgactttaaccagccaactggcgcatgccgatgtgattgatgatgccattggcaatattcagcaggcgatcaacgacgcctataaccccggcagcagccgtaatgatgatgacgacgatcgttacgatcgcagccatcaaaccgacagccgccagtacgacgatcgtcgtcgacagttagaagatcgacgccagcgtttagacgagcgtcagcagcagctggatgacgatcggcgtcggttagaagaggatgagcgccggttggaggatgattacgatcggtggtaaccccggtattgcaacgcgtaggccgggtaaggcgcagccgccacccggcaaaacctaatccagtaccagcatcatcccgtcataccccgcttcaatgccggacggcagcgggttatccatcatccacacgtcaaactgatggctgatatgcgtcaggatcacctgcggacagccaatcacctcgttcagcgcaatcaccgtattcaaatcacaatggttgcgcggcgtctccgggcgcggttcatggctacagtcgataatcatcgcctgcggctgattgtttagcagaaacgtcaccgttttatccggtagcccggcggtatcagaaagccacgccacgcggctgtgggcggactccagcagatagccaaacgtgagttttgaatggttgagcggcagcggcgtgacccgcaagccctgaagttcaaacatcacaaacggctccaccgtgtggctgaaatcgagaaggcccggatgcctgaacaggtcgtcacagcctgcgtcgtccggcggaccgtaaaccggaatggtcgctcccacgccccagcgcagaggaaaaagcccctgaacgtgatccatatgataatgggtaagcaaaatctgcctgaaactccccgcgggccagtcgtccatcaggtgtggaatacccgcgtccagcaaggtgaccgaatcgttgaatttcaccgccgcgctacaggggcgacggcgataattttcctgtaaacgcgcccgtcggcacgccgcgcagtcgcagccaaacaccggcaccagctgcgcccctccggttcctgtcagcgtgatcgtcagactcataacgcacctctacagcggtttggtgaagcggaaatggctttgcgtatatccttcacgaacataaaaacggtgcgcgtccacgcgcttcacgctggtggaaagctcggtcagctcggcgcctgcctgtcgcgcgacgtcctctgcccaggccagcagctggctgcccacttttaatccgcgcgcctgcggcatcaccaccagctcctggatctcgccgatccagcgggcgtgatgcaggtgaaactgcatatgcaggccgatcataccgatgatctgcccgtccagctcggccagctggtaacgcatattgtgatcctgcaagttggccagatacccggcgtgaaacgcctgatgatcgaactcggcctgcttaagttcgcagatcagcgcgtaaacgatcggcgcatcgtcggcggtggcggggcgaagctggcagtcaggcatgctgtttctccttctggcgaataagcgatagcaaggtctcgactgactgtagcaaacttccgtcgttattgaggagatggcaacccgacggggtgtagcgcgccgcccgttccagccgctggtcgatctcgcgcgcgttttcgcgcccccgcttttgcagccggctacggagaacgtccggggaaacctgcaaacagaccgggagcagcgccgcttcgtaccgggcgcgagcctgcgggagatgcgcccgcgagccgttaaccagtacgtcgaaccccgcatgcagccagaggtcaatctcaataccgacgccatagtagtaaccgttggcatgccagctcagcgccagcaggttttgtccggcgcgggtaaaaaactcctgctcgctcagggcgatatggttctcgcttccggcgttggcatcgcgcgtgatatagcggtgcgcgaccagcagctgtgaatgttcccgctgccgtaacgccgacagcaggctgtccttcccggagccggacgggcccattaaccagatgagtcttcccatcagaacaccctttttccctgacgccagacgtggtcgatatgaatgtgctcgcccttacggtgggcgagcaccagatcggcccgtttcccctcggcaatttcaccgcgatcgtgaagattaagcgcgctggccgggtttttcgtcaccaggcgaatcgcctgtggcagcgtgaagctgttgttctcgtcgtccgcgacgcggaaggccgcgtccagcaggctggcggggtaatagtcagaggagaggatatccagcaggccgagcgaggcgagcctgcttgccgccacgttgccggagtgcgatccgccgcgcacgatatttggcgcgcccatcaggacgttcatgccgtgcttacgcgatgcctctgccgcttcaaacgtggtgggaaattcagctatcacgctgccaagctggtgggattcgcgcacgtgatcgtgcgtggcgtcgtcatggctggccagggcaatattccggtcccggcacatcgcggcaatggagaggcgattcggctgcgaccactgggccgcaagctggagctgctcttcttcgtagcgcgccatctccgcgtcgttgagcgaatatttgccctgatagtattcgcgatacttttcaatgttggcgaactggcgctgccccggcgagtgatccatcagggaaaccagcgagaccggctcgcggcccaccagcttctcaaacagcggcagggtggtgtggtgcggcagctcgcagcgcaggtgcaggcggtgctcggcgcggttgaggccgcgcttttgcgtctcctccacggcgttgatcatcttctccaggttctccaggcgatcgccgccgtcgcgcacgtcgccaatcgccaccgcgtccagcaccgtggtgatgccgctggcgaccatcagcgcgtcgtggctgctcatcgctgaatgagcaggccagtccacctttgggcgcggggtgaagaatttatcgagattatcggtatgcagctcaatcagccccggcagcagccagccgccttcgccgtccatcgcttcaggagtgcggctccgggtttcggcaaaggcgcggatgacaccgtcccgcacctcaaccgagccgttcacgacctcattttccagcaccagcctgacattattgataatcatacgtttgtccccatcgggtgcagtctgtccgccacgcgttggcgtacggcgtcgtcgtggaagatcccgacgatcgccgcgccgcgcgctttggcctgttcgatcagttccatcaccgctgcgctgttcttactgtcgagcgaggcggtgggttcatccaggagtaaaatcgggtaatcgacgataaagccgcgggcgatgttgacgcgctgctgctcgccgccggaaaaggtcgacggggcgaggtgccacagacgctccggtacgttgaggcgcgtcagcaggctggcggctttagcggcgcaggtttcgcgcggcacgccgagatccagcaggggttgcatgaccacgtccagggcggagatccgcgggatcacccgcaggaactggctgacccagccgatcgtcgagcggcgcacttccagcactttgcgcgcgggagcctgaaccagatcgacccattcattgttatggcgaatatgaatatggccttcgtccggcaggtagttggcatacagggagcgcagcagggtggattttccgctgccggaatggccatgcagcaccacgcattcgccgttgctgacctctaacgaggcattttgcagtaccggcaggcggacgccgttttgctggtggagcacaaaggttttactgacattttcaacgtggatcattttggcctcgcgattcgttttgccgggtggcggcttcgccttacccggcctacgggtgcggtgttcgttttgccgggtggcggcttcgccttacccggcctacgggtgcggtgttcgttttgccgggtggcggcttcgccttacccggcctacaaggtgcggtgttcgtaggccgggtaagcgcagcgccacccggcaaccgcgccctcagttctgcaatacggacgacaccagcagctgggtatacggatgatggggatcgtcgagcacgcggtcggttaacccactttccaccacctgaccctgcttcatcaccagcaagcggtctgccagcaggcgcgcgacgcctaaatcgtgggtgacaatcaccaccgccaggtttagctccaccaccaggccgcgcagcaggtcgagcaggcgagcctgtacagagacgtccagcccgccggtcggttcatccataaacaccagcttcggatgggtgacgagattgcgggcaatctgtaaacgctgctgcatgccgccggagaaggtggtcggcaggtcgtcgatgcgcgaggcgggaatttcaacctcttccagccagtgctgcgccgtggcgcggatgttgccgtagtggcgcgcgccggtggccatcagccgttcgccgatgttgccccccgccgacacctggcggcgcaggccatccatcgggtgctggtgcaccacgccccactcggtgcgcagcaggcggcggcgatcggcttcactcatgccatacagcgacacgccctcatacaaaatgtcgccattctgcggcgtcaggcgcgcggagatggacttcagcagggtggttttaccggagccggactcgccgacaatgcccagcacttcgcccggccacagctcaaacgacacgtcgctaaagcctttgcccggcgcataaaggtgagtcaggttattaaccgaaagcagcggtttcattggctgttcgcctcgctctgttggcggcagtaatcggtgtcggagcagacaaacatccgtttgcccgtgtcgtccagcaccacttcatccagatagctatgcttcgaaccgcagatggcgcacggctcgtcccactcctgcaccgtaaacgggtgatcgtcaaaatccaggctctccacacgggtgtacggcggtacggcgtagatgcgtttttcacgtccggcgccaaaaagttgcagggcgggcatcatgtccatcttcgggttatcgaatttcgggatcggcgacgggtccatcacgtagcggccgttcaccttcaccgggtaggcgtaggtggtggcgatatggccgaagcgggcgatgtcctcatacagtttgacctgcatgatcccgtactcttccagggcgtgcatggtgcgggtttcggtttcccgcggctcaataaaacgcagcggctccgggatcggcacctggaaaatcaaaatctgatcttcagtcagcggggtctccggaatgcggtgacgggtctggatcagcgtcgcgtcttcggttttttcggtagtattaacgcccgttacgcgcttaaagaagttgcggatcgacacggcgttggtggtgtcgtctgccccctggtcgatgaccttaagcacgtccgcttcgccgatcacgctggcggtgatctgaataccgcccgtgccccagccgtagggcattggcatttcgcggccgccgaatggcacctggtagccggggatcgccactgccttaaggatggcgcggcggatcatgcgtttagtttgttcgtccagataggcaaagttgtagccgcttaagttagccattggcgcgctcccgttgcaggcgtttcagcagttccagttcggcctggaaatcgacgtagtgcggcagcttgaggtgcgagacaaagccggcggcctcaacgttatccgcgtgggccagcacgaactcttcgtcctgtgccgggcctgcaatatgctcgccgtagtccggcgcctggagcgcacggtcaaccagcgccatcgccatcgccttgcgctcgctcaggccatacaccagcccgtagccgcgggtaaagtgcggatcttcattctctggcgcgacaaaaccgttgaccatttcgcactcggtcatcagcagttcgccgatgttcaccgcaaaacccagctcttccggcacgatttcaatgtcgatataaccgctgcggatctctgccgcgaaggggtggttgcgcccatagccgcgctgagtggagtaggccagcgccagcagatacccttcgtcaccgcgcatcagctgttgcaggcgggacgagcgcgaacagggatagaccggcggcgtgcgggtgatgtcatccggtgtgctgccggtgtcctcctccgccttcgccagcccctggtttgccagcaggctaaagacgtgcggggaggcgtcttgttcagcgtcagagacgctgagctgcggtgtttcaccgttcgccagcagagtgaagtccagcaggcgatgggtgtagtcgtaggtcggaccaagcagctggccgccaggaatatctttgtacaccgcagaaatacggcgctctaatcgcatttccgccgtattcaccggctcgctaaccgccagcttcgcaagcgtagtgcggtaagcgcgcagcaggaagatggcttccacgttatcgccgctggcctgtttcagcgccagcgccgccagttcgcggtccgcgatgccgccttcggtcatcacgcggtcgacggccaggtttaactgctgttcaatctgggcgacgctcagctcgggaagggcgtcatccccccggcgtctgtgcgcctgcaaggcatgggcggcggcgatcgccttctcgccccctttgacggcaacgtacatcagcacacctccacgtgagtggttctcgggatcgccagcaggcgctcgccgcaggtcaggatcaggtcgataccgagcgggaacggatgcgggcgctcggtcagctcatgaatgatgcactccggcagctggggggcgaccatccgctcgtcggcaatccctgcacccgtcaggcgcagcatgcggccaccgctcaggctggagacctgcaaaatcagcgtagcgctggtttctggtgcgacggcgctgccttcgctcagggcgttaagctgttcgtggctgatttgctcgtcggccacggcgaagaccgcctgctggggctgctcgaccagcggcgcgttggtgtgaaagcgcaggttctggctggcgatatcgttcagcaatgcgcctgacagccataccggggtgtcgttgtccgccagggtcagcagcacgctggtcgaggcgaggttcagcggcagccagccctgggagagctggtgcagcgagacaatgacgcccggctcgctcatggctttcagcaggcgacggaaactctgttgggcatcctggacggccagggtaaaagcaggttgaagcgtcatgcgttgtctccgcgaacgagcgtaaagaagtcgacccggctggtattcacttcggcctgacgcgcggcaaggcgtgcggcgcggtcggcttccagcggggcaataagggtttccattaacgtctgaaaatgcggctgttcctgtaaaagcgcgtcgatcgctgcgcagcgctcggcgtgcgttttgtcgcgcccaagtacgtagccgtagcccagcgtgccgcttttcaggcggatcaccgcgcgggtgagggtggcatcgccggcgaagaagcgctcgccggtgccgcccatgcgtgcctggatctgcaccaggccgatctccggcgcgcggatcgtgtcgtagtccggcgtcaggccgagcgtgctcatgcgggcagccagcgcattaggctggctgtgggccagcacgcgcatccagcgctgacgagtggaggtgtcgaagtgcattcagtgctccatggtaaattcaatcatgtcggcgcgggtcaggctgacggagtattccgttgcgttgacgtcgccgtcacggtggttgagggtgcgcacgcagagcagcggggccatgttggggatctccagcaccttgctctctttcgcctgcgcgcggcgggcgctgatgcgcgtctgggtgcgtttgagcgcgatacccgtcgcgtcctgaagaaaatcatgcagggaaccgctggcgaaatgttgcagcacgggccagagggtgaggtccgcgaagtagtggtcgatctgacagaccgccacgccgttcacccggcgcaacgtgcgcaggtgaacgacgttgtcgccctcctgaatccccagcgcgtccgccacgtggcgggaggcggggcgcaggactgacagcagcttttcgctggtggggtggctgccctgatcgagcaggttctggctaaaacgcgcctgggcattgagcgggtagtcgaacggacgcatcagcaccagtacgccgacgccctgacggcgctggacccagccgcgctccaccagttgatcgatggcgcgacgcagggtgtggcgattcacttcgtagcggtcggcaagctgctgctcagcgggcaggtagtctccgcagcggtagtgcgtgcgcagctccacttcgagctttgccgcaatctcttgccagcgggtggggtaactggtcggatgtctggataagtgcatacaaatcaaagcctcgcttctcagatgaagtgcttacgcaaacgttgagagaggaaatccagcaggctcacggtgacgatgatgagcaccatcagggcgcaggtttgctggaactggaaaccacgaatggcttcccacagggtgacgccaatgccgcctgcgcccaccatgccgaccacggtggcggagcgaacgttggactcgaagcggtacagggagtaggagatgagcagcggcatcacctgcggcaggacgccgtacaggatctcttcgattttgttcgctccggttgcgcggatgccttccaccgggccgggctcgatggcttcaaccgcttcggagagcagcttggagagcacgccggtggtgtggatgaacagcgccatcacgcccgcgaacggacccaggccgacggcgaccacgaacagcatcgcaaagaccatttcgttgatggcgcgacaggcgtccatcaggcgacgcatcggctggtaaacccaccacggcacgatgttttcggcgctcatcaggccaaacggaatggagaggatcacggcgagggcggtgccccaggcggcaatttgcagggtgatcgccatttcaccgaggtagtcctgccactggctgaagtccggcgggaagaagtcggcggcgaaggtcgccatgttgccggaatctttgaagagcagcagcggatccatctccgcgcccttccaggagataacgagcaccgccagcagaacggcccagcttatgagcgagaaccagctgcgctttggcggtgggagggtgatggtttgcatgttggctcctttgggtttagtcccctctccctgtgggagagggttagggtgagggggaaatgtgcgtgctgatgnnnnnnnnnnnnnnnnnnnnnnnnnnnnnnnnnnnnnnnnnnnnnnnnnnnnnnnnnnnnnnnnnnnnnnnnnnnnnnnnnnnnnnnnnnnnnnnnnnnnnnnnnnnnnnnnnnnnnnnnnnnnnnnnnnnnnnnnnnnnnnnnnnnnnnnnnnnnnnnnnnnnnnnnnnnnnnnnnnnnnnnggaaatgtgcgtgctgatgccctcaccccggccctctcccacagggagagggagaaaagcgttactgcaccgctttattcacgctggtcatggcgccgagcgcggcggtcaggcggtcgagatcgtccagttgcgcctgaatttccgacactttgctggtcttctcttcttccttcagacccttgttatccttcacgccctgcatctgcttgaacagcgccagctggcgaatcggcaccagctgcaaatcgctggacgcgcggaacggcgcccagcccagacgcgccagaaccgctttctcttccggcgttttgccgtagttcataaagaagtcgtagaccttgtccttggtgctctcggagaggtttttgcgccacacgatcgggtcgcccgggatcagcggcgatttccagataaccttgatttccttcagcttgtccggcgcggaggtcttcagcttgtcgaggttttcagtgttgttggtggcgacgtcaacctgcttattcgccacggccagggcgttggtttcgtggctggcgttgaccgtgcgcttaaagtcgctggcggagacgttgtttttcgcgaagacgtagtagccagggacgaggaagccggaagtggagttcgggtcgccgttaccaaaggtcagctctttgcgtttggcgagcatgtcgttgagattgttgatcgggctgtctttgttaacgatgagcacgctccagtagcccggggagccgtctgccgcaacggtctgggcgaagacctggccgttcgcgcgatctaccgcttccatagcagagaggttgccataccaggcgatgtcgactttgttgaagcgcattccctgaatgatgcccgcgtagtccggggcgaagaaggcgtttactttgatccccagtttggtttccatatctttcaggaacggttcccactgcggcttcaggttttgctgtgattccgttgaaatgatgccaaagttcagcgctttttcttgttcctcagcgtaagcagggcttagcagggtgctgatgctgaacatgctggtgaaggccagcgcggcaacggctttgtagttcatgtccattcctcgttatggggacgttaagcagcctgcgcgcgctcttcgacgcggtttacgctgcggtagagatgatcgaaacgttcgttatcaaactggtggcttgcgccatcgaagaacacatggccctgacgcagggcgacgatgcgctcgcagtagcgcagggcgtaatccacctgatgcagcgtcaccaccacggtgatgccgtcgttctggttgatgtcgcgcagggtttccatcacgatgcgggccgattccgggtccagcgaggcgataggttcatcggccagaatgattttggctttctgcatcagggcgcgggcgatggcgacgcgctgctgctgtccgccggagagcgtggagacgcgctggtgggcgaaatgcgccatgccgacgcgggtcagcgcctgtagggcttcttgcttctgggatggggagaaccagcgcaggcaggtgcgccagaacggggtgctgccgagcgcgccaatcagcacgttctcgagcacggtcaggcggttcaccaggttgaactgctgaaagatatagcccgtctgagcgcggcttttgcggatatcgcttgccagacgccccgcgcgctgcacggtgttacccagcagctcgacgtggctttccggcgttttgtcacaggtaatcaggccgctcaagtgacgaagaagggtggatttacctgaaccagacggccccaacagcgccaccatttcgccctgctggacggtcagatcaacggcatgcagcgccttgttgtgatggaaggttttgctcagtttctcgacgcgaatgacagtttgcatgtgccgggcctcacgataaatgtggcctcatgctggcgcatcaatatgacattcaggttaagtgttggttgcgggagtttgaagagttgaggggagtttgatgacaatcaccgcaggcccggtcagcgcagcgtctccgggcgctgttgccggatgcgctgcgcttatgtggcctacgatttaacgacgttaatcatccacggcacgccgtatttatcggtgactttcccgaatccgtgcgcccagaaagtctcctgccaggccatttcgacattgccgccatcagagaggttgtcgaaccagcgtttgccttcatccacgtcctgcgtgtcgagcaccagcgtaaatccggcgtactgcgtgctgctaccgggtggcagaccatcgctcatcatgatatcgctgccggcaatgcggacattagagtgggcgatggcggtatccgggaagttcatgcctgacggacagccttcttcgctgttttcgtctttgggcatttcgccgaaggtgattttgtagaggagttctgcgccgacggcctgctgatagaaggcggtcgcctccgcacagttgccggcgaaagagatgtagggacttaacggcataatctttacctcacgtaagaaaagcccattaagtgtagttgcgggtggcccggtaagcgaagcgccaccgggcaggtcaatcagttctttttcacgaactcagatttcagtttcatcggaccgaagccgtcaattttgcagtcgatattatgatcgccttcaaccagacggatatttttgactttagtgccgatcttcagcatggaggaactgccttttaccttcagatctttcacaacggtaacgctgtcgccgtctgccagcaggttgccgttcgcgtctttcacgatcagcgcatcgctgtcctgtgcaggctccgcatcgttccattcatgggcgcattccgggcaaacgaacatgccattgtcttcataggtgtattcagaattgcatttcgggcagtgtggaagttgcatgttggtatcctcaaaagtgttaacacgctggaaaacgccagctaaatgacggcattgtgccgaaaaaggcagcgagtataacgcaaatccccacttttgtcggtgatattgttttataaaaatagcgcataaatgcgtaagcgatgacacgaactgtcagtgaattaagggaagcttaagccctgaacggcagagatcgtaatcatgctaaatgtatcgaatattttattacagcaaattgctacgctgtgccatttcggataaggtgaaggaacaagccgttatttatctatcctcttctgacgccatacatcttttggcgccagggaatacctctcttttttggtgggtaaataacgatgatatatcctgatgtttcctgaaaatgcgttttgtctattcacttttggctttctggccaggggatgttttacacgtattacgagggtggtttttaaattctcattatcttcagttagttgtattaaatgaacatgttttccatacgtgatcatataagcctgaaaagtataattaaaacatcgtggcttaataaaagtaataaatttgcgttaagggaaggcttttatcatgcacacacagaccatatttgaattaagccaggaagctgaacgattgttacagctcgctctgaacaatcttgattcattaaaatctatgccgattgcaaagctggatagcacagccgctgcgatgagcggcgttaataacaacgttttgccgttacattttagcgcacggggtgtcgacgctcagcaggcgatgctgaataacgaattacgcaaaataacccgcctcgaaatggtgctggcgattgtgggtaccatgaaagcgggaaaatcgaccaccattaatgcgattgtgggcacggaagtgctgccgaaccgcaatcgtccgatgacggcacttcccacgctgatccgccatacgccgggccagaaggagccggtgctgcattttttgcacgtttcgcccatcgataccctgattacccagttgcagaaaaaactgtgcgataaagatcgcggcaagctggcgcggcgtctggaaatcgacaaggacatgaatacgctgctggagcgcatagaaagaggtgaggcgtttgaaaaacatcacctgggcgcggagcccatctttcattgtctgaaaagcctgaacgatctggtgcggctgtctcaggcgctgggcgtggagtttccgttctctgagtatgccgcgatagaacatattccggtgattgaggtggagtttgtgcatctcgccggtctggatgcgcacctggggcaactgacgctgctcgacacgccggggccgaacgaggccggtcagccgcacctgcaaaaaatgctcagcgagcagctggcgcgcgcctccgccgtgctggcggtgatggactatacacagcttaaatctatttctgatgcggaggttcgtcaggcaatttcggctgccgggaaatccgtgccgctttacgccctggtcaacaaattcgatcagaaagatcgtaacagcgacgatgaagagcaggtgcgggcgatgatttccggcacgctgatgaaaggaaatatttctccggggcaaatttatccggtctcttccatgtgggcctatctggcaaaccgcgcccgctatgagatgaacgttcatgggcgccttcccgatcatcaggatcagcgttgggtacaggattttgccgaggccgcgctgggccgccgctggcgaacggccgacctggacgatattgaccatattcgccatgcggcggatctgctgtgggaggattcgctgttcgaacagcccatccgcaaactgatttacgcggcttacgccaacgcctcgctgttcgctttgcggtcggcatcgcataagctgctgaactatgcgcaaaatgccagagaatacctggattttcgccatcagggactgacggtcgcttttgatgagctggagctgaatattgcgcgtctggaagaggatatgacgttgctgcgtcagcggcagagcgtggtgagcgatgaggtccagcatgaagttgaagaggcgctcaacacaacggatgcattcctgcttcgccagaaaggtgaacttcaccaggcgctgggcgacatttttagccgcccgtctattcttgatttagcagggcgcgagccatccagtttgcgtgcagacgacgcggatgcgatccagcagctggtgcttgacgatgaagggcaggcgcagattgtcctgagcaagatccgatcgtcatgcgagcagattatgctgaatgcgcagagcagaattggccgggagctggcgttacgcttcgatcagctggagtctacgctcgcccgatcgttgaatgaggcgatgcgacccatcgagacgcgaattaaggagcagctcagtcatgccggatttcgggcgcggattagcttcccggcgtttcaggcaaaccagcttaatttcaatacgcgcggcttatttaatgatgccattgtgcaggacacccctcccgccagtcagccagcaggggcaggcagcgtacgtaataccgtctcgcgctggctcaataatcccggctggggctgggaagagtatgtcgtgacgcgcacacgctatgtcatcgacatcgttcagcttcatggcaaatttacgcaacatatcgatcagttttgcgatcaaatacgtaaagctttggccgcgcaggtcgatgtctctgttacggcaggtatggcaacgttctttgcagagttttcgttgtgcctgaccgggttacaggaaagcttgcgtgatagccttgccgtgcggcagcagaatgaacattcaacccgggcgcttagccagttgttgaagcaaagtatgactactgcggcgtggattcaggaagatacccgactgttacgcgatgatattcaaaccttattcgcggcagagcaaccatgacaacacagctactggacggtcccgggcggacgctggagtgtattcatccaaaatttatggtcgatttggtccagggggcggacgctgcacgtcactccctcctggggccacagcaactgcaatttcgtgagcgtttgacgcaggagatcattacgcagacccggctgcggccgtgggcaatggcgggaatgctcaacgaaaatgcagcgctgcggctgggtctggcggagaaactggccggtatgctcgaccccggacaccttgcgctgacccgtatgtccgacaggctggtagccctgcgccagcaggtgaatccacgcctccctcaaccgcccggattgttgcaacagtacgaagagctctcctcacatttcaaccagcgtgccgcctataaagagaaagcgctcgcgcagcgcggccttacggttcaggcgggtgagcacagcgagcaaatttttacccgctggcgagccgggcagtatgacggctggtcgctggctggccgctgctttatcgtgctggaagagttgcgctggggggcgtttggcgatgcctgtcgtctggcgaatagcgatgtggcggccatgctgaaagataatctgcgcagcatggctgcaaactatctggcacagggaattaatgcttctcccaccacccggcatttttaccatcagtggctgacgacgcccgcttctcccggtctgattgattataaagatatgctggggtggctgggggactggtgtcaggcggataaacatccggtgagctggtcagtgacgcagagctggcaaacggtcgcgctgggaatgccgagactctgttcggcaaaacggctggtggatggcatggtggaagagatatttggtacgtgattgccccctctttttaaggagggggcgaaagggttagtggtgcatttctaccgcttcaggttctgtttgggactcaggcacatgcccaaagcgtctggcatacagtgccgtgatgacagggaccagaattgccgtcacaatcacgctggcggcaaccagagccgtggcggaagcggccacgggttcaaaggccgggttaatctgggcgataatcaccgggttggctaccgcagcgcctgcggccgaagaggcggccacgcccgcggttccgttgccgcccccgatgacgcggtctgcaataatcagtggaatacccgtgatgacgatgacggcaacacccagcacaatgcccagcaggccggtttccagaatcacgttcaggttgatggtattgcccaacgcgaagccgaagaacgggatcagtaccggggtggctttgctgaagaaatcacgcagatcgtgatcgaggttgcccagcgcaaaaccaatcaggaacggcaggatcgccccgacaaaatggtgtggttcaaaagaggcaaggccggcagaacccagaatcaacatcgtcatcagcggacccgactccagggacatcagcacgaacgcgcccgattcttctttggtgccatattgattcatcaggctggcatagagaccgccgttggtcatatccattgctgagactatggccagaacggataatccggcgaagaagccggtctgaattccattctccggaatgaacattgcacagatcatggcaacaacccaggcgaccgcaattttagtaatgaccagcgtccctgatttacgtaataccgtacctgttgcacgcaagttaatagatgcgccgatgcaaaagaaccagactgccagaatcggtaccgttccggtaatcataccttttgtaaaaccgccaaaataagcaccggtattcggggctagcgtatttaatatcgcgccaagtaccagcgggaccagcatcatcccgcccgggatgcgttctattgttgctttaatcttcatcattaaccctcacatctcgtccgcgtggctggcggaaagctcaaaaaatagatcaacaaattcaaacgattgccttttttagggccaatcgattcgttatttatgctgtagagcgaaattcaggtgttcagcattccttcatttgaaagctgctgggatatcgtgttcggatttatcatgcgatctttggaattatgattcaacgaaaataaaacgctgttttagttatcttcgtcacatattgaatgtaaacaggattgcccactgttaataattgaattttgtgtaaattcgctgtgaagaaatgtgcttgcattttgtttggggaggaataataacgggcgttaagatctgtttgataagggggtttagaatgaccttatttatcgtgaattgacaaaagctgaaggcaacttacgaacaggaaaaataagtgtgaagttgatcacatatataaacgctggtagggtaaaaaggtctttaactgcccagacaggcgtcaacaggttcggttgtattgaggtaaaacgtcaatgtaagtaaacctgctacgcttgaataaggagattcgcatggagcgggtctctggttcacagcttgtaaaatgcgctgtgaaacggacagggctgagtctacgaggaaagctatgcttagaaggaaaaaagtaaaacccatcacgctgcgcgatgtcaccattattgatgacgcgaaactgcgcaaagcgattacagcggcctcgctcggtaatgcgatggagtggttcgattttggtgtttacggctttgtggcctatgcacttggtaaagtgttcttccctggtgccgatcccagcttgcagatgattgctgcgctgggtacgttctccgttcccttcctgattcgtcctctcggtggccttttcttcggcatgctgggtgataaatatggtcgccagaagatcctggctattaccattgtcatcatgtcgataagtacattctgtatcggccttattccgtcgtatgcaactattggtatatgggcgccgattctgctgttgatctgtaagatggcgcagggcttctccgttggtggcgaatataccggcgcatcgatttttgtcgctgaatattctccggaccgtaaacgtggctttatgggcagctggctggactttggttcgattgccggttttgtcatgggcgcgggggttgtggttctgatctcaaccgtagtgggtgaagagaacttccttgactggggctggcgtattccgttcttcctggcgctgccgctgggcatcattgggctttatctgcgtcacgccctggaagagacgcctgcgttccagcagcacgttgaaaagctggagcagggtgaccgtgaagggttacaggatggcccgaaagtgtcgttcaaggagattgcgaccaaacactggcgcagcctgctgacctgtattggtctggtgatttccaccaacgtgacctattacatgctgttgacctacatgccgagctacctgtcgcataacctgcactactcggaagaccacggtgtgctgattattatcgccatcatggtgggtatgctgtttgtgcagccgattatgggtctgctgagcgaccgctttggccgtaagccattcattattctcggcagcgtcgccctgttcgcactggcaatcccggcctttattctgattaacagcaatgtgctggggctgattttcgccggtctgctgatgctggcggtgatcctcaactgcttcatcggggtgatggcttctacgctgccggcaatgttcccgacgcatattcgctacagtgcgctggcggcagcctttaatatctccgttctgattgcgggcctgacgccgacgcttgctgcttcactggtggagagcacgcagaacctgatgatgcctgcttactatctgatggtcattgcggtgatcggcctgattaccggtattaccatgaaggagacggcgaatcgtccgttgaaaggggcaacgcctgcggcgtctgatattcaggaagcgaaagagatcctgcgtgagcactacgataatgtagagcagaagattgaagatattgacgcagagattgaggcgctccagacaaaacgctctcgccttgtcgatcagcatccgcgaattaacgagtgataaaaaaacccgccgctggcgggttttcttttattagcatcctgcggcaatatagtcgccgccggcgctgacggggatcaccgtcaggaacaggatcgtcgcgaacagtatcagaacaacccctccggcaattttgaccatcggcattacccagttcagggacgtgccgccgccaaaccaggttactgtgcgttcacgcgcgtaacgtactgccagcgacagccccataatcgacagcgccgtgcccagcgacattgtcatcacagcagcaatcccccagctaataataccgagcgcattcgagaacatcaggatcataattgccccgctgcacgggcgtgcgccaatggccagcaccacgcccagacgggttttccagtcgcttttagtcagatccacccctacgccgtgatggcagcagccacagcgttcattatgctggtgaagcggcttgatggcgctaatcgccattttgcgcggacgcaggctgctgagcgcctgataaatgataaacgcgccgaagacggcaatcagcacggcgctgattttctcgacgtaccaacggctggtgctgatatctcctgacgcgaggttcaatccaaccgccaggataaagacaaagacgatcgcgctgacgccctgcatcatgctaccgataaacggtacgacgcgcgccgcgagctggctctctttattggtggtgagatacgtggtgacgataaatttgccgtgcccaggtccaacggcatggagtacaccataaagaaacgcaccggttaacaaccatagcccaccgctgtactgatgattattaagttgcagcagatacatcaccagatatcggtgcagggtgatctgggtggcgaggcaccactgaataaaagcattccagtgcgtatgcagtgcaaaacctgccataagtaacaccagcacggcgagcccggcggttgggatacgccagtcacgttgaagtcgttgtgtcgtcatgaggttggcccgcgagagaaatatttgccgctagtatagtgttcaaatcgctggatcacaccgggatcatcaatagattgtggataagtctgtgcgtaaaaaggtataaggcggggttttgctggggaatacagcagtcagtcatttttttgcaacttttctgttgcggtcgctcgggaactcaatacctatcttacgctggcagcctgatggctttaatgccacaatatttttttcttcgcatgcaggaaagatgatgaaaaaagtagcaattgtggctgcgatgctgacgttagcgggatgtgttcaggtcgataactatcaggaagtaattaagcacccggtaccttcgcaactggcaggttactggcagtcgaaagggccgcagagcgcgatggtgagcccggaagcgatcgccacgctggtggtgacgccagagggggatacgctggattgccgtcagtggcagcgcgttatcgcggtgccgggtaagatcatgctgcgttcagatgattattataacgtgacgcgtaagctggatgtctatccgctggagcgtgatggggcggcgctggagtatgacggtatggaactgtacaaggttgaccgtccaacggtggaatgcgcagattacctgagcaagaatccgctggagagtaagcttccgtagcggtaaaagcaaaacggcaatcatattgccgtttttagggtttgctccctctcccggtgggagagggtcggggtgagggcatcaggccgcactttcccagcattacagcgcgtcctcaatcacccagacgctgacgcttcccccgttacagaagaacgtcccttcgccatccgccgccgtggtcacggtttcctcgcggttgcctaaaaaatcacgccaggtcttattgccgtaattttccccgaggcagatggtcttctcgccgtcatcaccattcgacagcaccaccacacagcccgggtgctcctcagtcccgctgcggctgaacgcaatgcagtttggatgatcgaaaaacagcgtctgcacgccgtgggcaaaacgctgccgggcgaggatcagctcgtggagctgttcaatcaccggcatatcgatgtgatacgtctcgccatccccgccggtgtcgtcatagctggcgccaaaaagatccgggtagaatacactcggcacgccgttttcacgcagcaggatgagcgcgtaggccagcggtttgaaccaggcttcaaccggggcttccagcgcctgcaagggttgggtatcgtggttggctaccagggtcacggcatggaacggatcggcttccaccagcgtaccggtgaaaatctggctcatatcgtagtcgcgtccctggcgtgaggcttcgtgaaatttcatttgcagcggcgcatcaaacagcatggttttaccgtccacctgattgatgtagtgctgcaatttatccacttcgtgagaccagtattccgccacaataaacagcggctgcggggccacctcctggacgtgctcaatccactctttgtagaaccaggccgggatgtgttttaccgcgtccaggcggaagccgtcgcagtgggtttgctccatcacccagcgcgcccagtatttgatctcctccgtcaccgcatggttgcgaaaatcaatgttttcacccatcaggtaatcgaaattgcccatctcgtcgtcgacctgatcgttccagccttcgccggtgtagtcgttcacgattttgaagataccgtcctcattggggttttcaatgtggtcgataccgctgaagcatttgtaatcccagatgaattgcgaatactgcccggcccgaacggggaaggtgtaacgcgtccaggcttcgcattcgatgatctcatcgctgatttgggtgcgatcctgagcatccacgcgctgcacgcggacgggttccttttcatcggcccccattttgtggttgaccaccacgtccagaagcaccgcaatctggttgctttttaaggcgttgatggcctccagcagctgggctttatcgccgtatttggtggcgacgctgcctttctggtcaaactcaccgaggtcgaaaaggtcataagagtcatacccgacggaatagccgccggatgcccctttgtatgccggcggtaaccagaccatattgatgccgatttcgttcaggttgggggctaatgccgtgacttctcgccacagttcaccgccggtggggtagtaccagtgaaaacattgtaaaagtgttgggttgcgcatgcaccatctccatgaggtcgcgaaactcaattatggagcaggtttggcagaaatgcctggcgaacgaaacggttaacgctcgaacgccagttaaatggctaattaatatcgctattactttgcggaaccaggacatgaccgccctggttaccgtaggtggagagaacggttttctggatggaggattgcccaaccagcttcgccagctcatccattctggcttgcagcaacgtttttacctggccttcgttgtccaggatcacccgcagcgtcgggcgaagctgctcctgaatctgcatcgaaggttcactttcctgagtgagacgagccagtgagtgcaccgcattaacatagtcggtttcacagatgatcagatcatcccatagtccctgccgggccagtcgcaacatcaactggctctgctcaaggagttgctgataaagggcataaagttgcggtgcgttactcattagacggcgtcctgcatcagttgtggcgtaccggcaacctccttccacccgtcagcgatattgcgcagcaagttttccacctcttcgatggcgctggcgtcgttattcacattggcgtgcaggaggcgacgtaccatataggcataaagggcaatcaggttttgcgtaagctcatcaccgttattttccaccaggccaaccttcagcccgttttcgataatgttgatggcttttgagagcgccagcccttttgccgggatattaccgtctgccaggaacagacgcgcgcgtaccagcgcgctgagggctccatcaaatagcatgataaccagctgctgctggctggcgctcatcaccgcgctttcaacttctatctttgcgtaggcttgcgtgccttttgcgccgtacatgttatccccctcgggtctgattagcgtttactacttgttgctggacgtattttcgaactgctgcgtcaggtagctgctggtgttgttcagcgaggtcatcagtacgtccaactgggtaaactgggctttgtactgcgccactctcgcgtcaatacgttcgctcacggcgttatattgatccgttaacttgttcagcgttttgctgacgccatctttggccgcctggataatgcctttactggaaagccagtcagtcagatgggtggccatggtggtagtgatcccggtggttttaccgtcacccacaaccaaatctttcacggcagacgggttatccgtcagcgcttttttcagcttgtcgctgtccagctccagcttgcccgtgcttggatcggaggtaatgccgacctgagacagcgttttataggcggttccgccgacggagttgcccagcatggttttcagctgcgtctgaatagtacgcagcgtagtgtctccaagcagggcaccgttgctggtatcttgttcatccttacccggatctactgccgtgtattttgtcagtgaggcgaagctatcttgcagggtgttgtaggcatccacccaggctttcaccgccgtttccgctttcgacgtatctttagcaatcgtcagcgtctggttaccggtggtgacgtcgttcaggttcagggtgatatcttccagcgcatcgctgatggtgttgctgctgttttcgatatcgacgttattcaccttcagcttcgcgttctgcgcggtgacgctttccgtcatgccgttgctggcgtcggtgctggtgccgttgtaacccataaaggattgcagggcgctgtcgccgctcacgctgatgctgaccgcgttgtccgccccggtttcggtggaggtgatggacagacgatactgaccattaccgacgttaataatactggcggtcacgccagcgtcagctttgttaatcgcatcgcgaatgccggtcagcgaggagtttgccgcgctgatatcgacggtcaccggatctttaccgttaccggcggtaaaggtgatcttgctgtcagccgtggcaatggccgttttgctgtccggctgcgcatttttggtcgtcagggtttgcgcctgcgccagctgcgacacgctgatggtgtatttaccggcaatcgcgctgccggtggtggtggcgctgaatgccgtggtgctgctcgacgtgctggtcgccgtaaacagatcggctttattcagcgcggtgttggcggtctgaaacgcttccagtgaactcttcaacgtgccgtaagcgctcagcttggcggtataagatgactgttgtttggaaatcggcgtcagctgtgctttttcggccgtggtcagactatccagaatgtctgctaacttaagacccgaaccaatccccaatgatgaaatacttgccatatttattccttaatctatcgacacgtagaacgaatagtggggttatcggcctttatgggggaaagtttacggttaatttctttttttaatggcgggaataacgctaatagagaagagcttttccgtggctaaaaaaattaacgcgatcctgaaaaaatatctaaaggttgttttggaccagacgataacacctttgacggcgatgaagccgaagggtggaaacccaaatctaaccaaacagatttgatgaacaacaggaatcgaaatcatggcacagtacattaataccaacagcctctcgctgatcactcagaacaacatcaacaagaaccagtccgctctgtcttcttctatcgagcgtctgtcttctggtctgcgtatcaacagcgcgaaagatgacgctgcgggccaggcgattgctaaccgcttcacctctaacatcaaaggcctgactcaggctgcacgtaacgctaacgacggtatctctgttgctcagaccactgaaggcgcactgtctgaaatcaacaacaaccttcagcgtatccgtgagctgaccgttcagtctcagactggtaccaactctgattctgacctgtcttcaatccaggacgaaatcaaatcccgtctgtctgaaattgaccgtgtatctggccagactcagttcaacggcgtaaatgttctggcaaaagacggcaaaatgaatattcaggttggtgctaacgatggcgaaaccatcaccattgatctgaagaaaattgattcaaaaacccttggtctggacagctttaacgtcaacggtcctaaagggactatttcagcagccggtgctgctgatttcaaagagttctatggttcaacaacccaagttgcaggtgcaactgttacagaaaaatcagcagatgcattggctactcgtttaggtgtagacactggtagcattgcattaactggtaatgctgtttacaaagacgaaaatggtaacctgttcgcaaaagttaatattactgccgctgatgctgctgaaagtaataaccttaaagcgaatggtttcgatattgctgcgactaaaaatcaagacttttatattgcccttgacccgcaagcagcaaatacaacaactgcaactgtcgctgcgtttaccatcgatactgataatcttagtttgactagcctgaccactggttcaacttccaacccactggctaaactggacgaagcgatcgcttctgttgaccagttccgttcttcactgggtgcggttcagaaccgtctgagctctgccgtaaccaacctgaacaacaccaccaccaacctgtctgaagcgcagtcccgtattcaggacgccgactnnnnnnnnnnnnnnnnnnnnnnnnnnnnnnnnnnnnnnnnnnnnnnnnnnnnnnnnnnnnnnnnnnnnnnnnnnnnnnnnnnnnnnnnnnnnnnnnnnnnnnnnnnnnnnnnnnnnnnnnnnnnnnnnnnnnnnnnnnnnnnnnnnnnnnnnnnnnnnnnnnnnnnnnnnnnnnnnnnnnnnnnnnnnnnnnnnnnnnnnnnnnnnnnnnnnnnnnnnnnnnnnnnnnnnnnnnnnnnnnnnnnnnnnnnnnnnnnnnnnnnnnnnnnnnnnnnnnnnnnnnnnnnnnnnnnnnnnnnnnnnnnnnnnnnnnnnnnnnnnnnnnnnnnnnnnnnnnnnnnnnnnnnnnnnnnnnnnnnnnnnnnnnnnnnnnnnnnnnngcctgattacgctcaaaccccgcttcggcggggttttttctgtccgcatttacgcgtaaccccccaaataacccctcatttcacccactattcacccgattaaaacccctccagaatcggataatcatgccgataactcaactaacgcagggctgtttatcgtgaattcactctataccgctgaaggtgtaatggataaacactcgctgtggcagcgttatgttccgctggtgcgtcacgaagcattgcgcctccaggtgcgtttgccggcgagcgtggaactggacgatctgctacaggcgggcggtatcgggttattgaatgcagttgaccggtacgacgctctgcaaggaacggcatttacgacttacgcagtgcagcgtattcgtggtgcgatgctggacgagctgcgcagccgcgactgggtgccgcgcagcgttcgccgcaacgcgcgcgaagtggcgcatgcgatggggcagctggaacaggagctggggcgcaacgcgacggaaaccgaagtagcggagcgtctgggcattcctgttgaagagtatcgccagatgttgctcgataccaataacagccaactcttctcttatgatgagtggcgcgaagagcatggcgatagcatcgagctggtgacggatgaacaccagcaagaaaacccgttacaccatttactggaagggaatttacgccagcgcgtgatggaagcgattgaagctttaccggaacgtgagcaactggtgttaaccctctattaccaggaagagctcaatctcaaagagattggcgccgtgctggaggtgggcgagtctcgggtgagccagctgcacagccaggccattaaacgcctgcgcacaaaactgggtaagttataggtgagttattcgccttggaaatgccgcacaacgtattgacaaccaggagttatcatgacggtgcagcaatctaaaagacggcctttaagccgctacctgaaagactttaaacacagccagacgcattgcgcccactgtaaaaaattactcgaccgcatcacgctggttcgtcgcggtgaaatcgtgaataagattgcgatttcccgcctcgacacgctgatggatgaagccgcctggcttgaagagcaaaaagagtgggtagcgctttgccgtttctgtggcgatctccattgcaaagagcaaagcgacttcttcgatattatcggcttcaagcaattcctgtttgaacaaacggagatgagtcacggcaccgtgcgtgaatacgtggttcgcctgcgccgcctgggtcagcatttgaccatgcaaaatatctcccgcgatctgctgacgaccggatacctggatgaaaatctggaaccctggttgcccgccaccagtaccaataattaccgcatcgcgctgcgaaagtacgcgcaatataaagtccagatgccgggcgtcataaagcagaaagtccgcgccggaacaacttctgatatatattaaaaaagaataagatgtagcgcagccgcctttgacgttgcaggcgatttctctacactactcaaaaattccactgtatcggggtacttatgaaattagcacttctgggtcgtcaggcgctgatggggatgatggccgttgcgctggtcgcggggatgagcgtgaaaacgttcgcggcagagaatctgctcaacaaagttaaagagcgcggcacgctgctggttgggctggaaggaacctatcctccgttcagcttccagggcgacgacggtaaactgaccggttttgaagtggagtttgcgcaggagctggcgaaacacctcggcgttaaagcctccctgaaacccaccaaatgggacgggatgctggcgtcactggattccaaacgtattgacgtggtgattaaccaggtaaccatttctgacgagcgtaagaagaagtatgacttctccacgccgtacaccgtgtccggtattcaggcgctggtgaagaaaggtaacgaaggcagtatcaaatccgcagcggatctgaaaggtaagaaagtcggcgtcggtctgggcaccaactacgaagagtggctgcgccagaacgtgcagggcgtggacatccgtacctacgatgatgacccgacgaaataccaggatctacgcgtaggccgtattgacgccattctggttgaccgcctggcagcgctggatctggtgaagaaaaccaacaataccctggctgtcgcgggtgatgcgttctcccgtcaggagtccggcgtggcggtgcgtaaaggtaacgaggatctgctgaaagccatcgacggcgccattgctgagatgcagaaagacggcagcctgaaggcgctttctgagaagtggttcggcgcagacgtgacgaaataagtctctgactgacaaaaaaaggcgcttttaaaagcgccttttttatttctcgcgcgtctgcgtgcataatgaaataacaattgtttgcgtgaccggaggaaccatgtcactacagaatttaacgcgctttccccgtctggaatttatcggcgcacccacgccgctggagtatctgccgcgattttctgactatctggggcgcgatattttcattaagcgtgacgatgtgacgcccatggcgatgggcgggaataagctgcgcaagctggaatttctcgccgccgatgccctgcgcgaaggcgcggacacgctgatcaccgccggggcaattcagtctaaccacgttcgccagacggcggcagtggcggcgaagctgggactccactgcgtagctctgctggagaatccgatcgggacgcaggcagagaattacctgactaacggtaaccgtctgctgctggatctgttcaacgtgcaggttgaaatggtcgacgcgttgaccgacccggctgcacagctcgacgagctggcgacgcgtctggaagcgcagggttttcgtctgtacgtgatcccggttggcggctcgaatgcgctgggtgccctcggctatgttgagagcgcgctggaaatcgctcagcagtgtgaaggcgcggtgagtttatcctcggtggtggtggcgtccggcagtgcggggacccatgctggtttagcggtcgggcttgagcagctgatgccggacgtcgagctgattggcgtgaccgtttccagaagcgttgcggaccagaagccgaaagtcgtcactctgcaacaggcggtggctgaacagcttgcgcttcaggcgaaggcggaaatagtgctgtgggatgactatttcgcgccgggctatggcacccccaatgatgaagggatggaggcggttaagctgctggcccgtctcgaaggtattctgcttgacccggtctataccggcaaggcaatggcgggcctgatcgacggcatcgcccgcaagcgctttaaggatgaaggacccattttgtttgttcatactggcggggcgcctgcgctgtttgcctatcatcctcacgtctaaaaatcaggtagaaaaataataatgcaagaaagtattcaactggttattgattcgctgccgttcttgcttaagggcgcggtatttactttacagctcagtatcggcgggatgttcttcgggctggtgctcgggtttgtgctggcactgatgcgcatgtcgaacatctggccggtgcggtggctggcgcggttttacatctccgtgttccgcggaacgccgcttatcgcccagctgtttatgatttactacggtctgccacagttcggtattgagctggatccgatcccggcggcgatgattggcctgtcgctgaatacggcggcgtacacctcagaaacgctgcgtgcggcgatctcctccatcgataaaggacagtgggaagcggcggccagtatcgggatgaccccgtggcagacgctgcgccgggcgatcctgccccaggcggcgcgcgtggcgctgccgccgctgagcaacagctttatcagcctggtgaaagacacctcgcttgcggcgaccattcaggtgccggagctgttccgtcaggcgcagctgatcacctcgcgcacgctggaagtgtttaccatgtatctggcggcctcgctgatttactgggtgatggcgacggtactgtccgctctgcaaaactattttgaaaaccagcttaaccgccaggagcgtgatccaaaatgagtgcaattgacgtcaaaaacctggtgaaaaaattccatggacaaacggtgctgcatggcattgatcttgaggttgagcagggcgaagtggtagcaattatcggcccgagcgggtcaggcaaaaccacgctgctgcgcagcatcaatttactggagcagcccgaaggcgggacgatccgcgtgggtgatatcaccattgataccgggaaacccatcagccagcaaaaagggctgattcgccgcctgcgccagcatgtcggcttcgtgttccagagctttaatctctttccgcaccgcacggtgctggaaaacattattgaagggccggtcatcgtcaagggggaacctaaggaagacgcgacggtccgcgcccgcgagctgctggcgaaggttgggctggcagggaaggagacgagctatccgcgtcgcttatctggcgggcagcagcagcgtgtcgccattgcgcgcgcgctggcgatgcgcccggatgtgatcctgtttgacgaacccacgtccgcgctcgatcctgagctggtcggggaagtactgaacacgatccgacagctggcgcaggagaaacgcacgatggtgattgtgacgcatgaaatgagcttcgctcgcgacgttgccgatcgggctattttcatggatcaggggagaatagttgagcaggggccggctaaagcgctgtttgccaatccgcagcagccccgaacccgtcagttccttgaaaaattcttaatgcagtagcattttagcgttcaatttgctccagatgccgcttctggagcaaattatcctcccttaaactccgttctgttgcttttttattccgactgatgtggataagccatcgccaaattaaagataatctgcctgtggccgatattttatataaataatcatgctttatgtgttaggttatattcaccataataatgattatctttatcagaggcttcattcagtaagtatgagggatatagactttttcacctggcgacgggaatgcttcctccggtttcaggaaatgacctgtgccgaagaggtatatcaggaacttcagcgacaaacgcaggcgcttgaattcgattattatgcgctttgtgttcgacaccctgtgccatttacccgcccgcgaacctccgtccattccagttatccgcaacaatggatggcgcaatatcagtccgagaattatttcgccattgacccggtgctgaagccggagaatttcattcagggacatttgccctggacggatgaattattcacggatgcccagcaattatgggacggcgcgcgggaccacggtttacgcaagggaataacgcagtgtctgatgatgccaaatcatgcgctcggtttcctctccgtgtcatgtaccagcttacaggcacactcgatatccagtgaagaagttgagctgcgtttacaaatgctcgtccagatggcgctcaccacactgttacgctttgaacatgagacggtgatgccgcctgaaatgaaattcagcaagcgtgagcgggaaattctgaagtggaccgcagaagggaagacgtcggcagaaatcgccatcattctctccatctcggaaaataccgtcaatttccatcaaaagaatatgcagaagaaattcaacgcaccgaataagatccagatagcgtgttatgccgcggcgacggggcttatctgactgatatcacgttctgcgtgtcagacgagaaaacggctgaatgctttgcatccagccgtttttgttactggcggtaggcttgtttaatttgcttaaccgtattggcaaaaacagcggattccgcctggtcttccatctgcgcgatctgtttttccattttaatgatcacacgaccagcatcagcctggcccatcgcctgtagcataagcgtcagcagcgacttcaggcagtttacttcctgtgccagttcctggttattctcggcagtggcaaattcaggtgtgctcatttattttcctcattataaaacagcgcatgagcgcgacgatgaaagttaaggcggcggagtataccacaagctacggcaaaaaatgcagtggttgttttttatacttatcgcgcagtgattattgggcggcgcggattatgaaggtactctgtccaatatgttagcgacaattaaatgtttatccccggttcgccattcgttaattgttgttacaaaaaatcgcgcgctctttttcgtttgagttaacaactgttttagtaacttttcgaatgtcgatgctaaaaaatagcggtaaaagcccggcgggcaagggttttctttccacttactgtacagcttaatttccaaaaacgagacaagaatcgaatagccgattttttagcgttttaatcttgcatggaaaaccgttaatataaacccaattagcagtcagtagcgttatccctattctggagacatttcctttgatcaacgtccttcttgttgatgaccacgaactggtgcgcgcagggatacgacgcattcttgaagatataaagggtattaaagttgccggcgaggcgtgctgtggcgaagatgccgtcaaatggtgtcgcgctaactccgcagacgtggtgctgatggatatgaacatgcccggtattggcgggcttgaagccacgcgcaaaatcgcgcgcatgttcgttgataccaaagttatcatgctgaccgtccataccgaaaatccgctgcctgccagggttatgcaggcgggtgctgccgggtatctcagtaaaggcgccgcgccgcaggaagtcgtcaatgcgatccgcaccgtacacgccgggcagcgctacattgcttctgatattgctcaacagatggccctgagtcagattgaaccggaaaaaacggaatctccgtttgccagtttgtctgagcgcgaattgcagattatgctgatgatcactaaaggtcagaaggtgaatgagatctcagaacagctgaatctcagcccgaaaacggtcaacagctatcgctatcgaatgttcagtaaactgaacattcacggtgatgtcgaactgactcacctggccattcgccatggtttgtgcaatgcggagtcgttaataagtcagtgagtgaagcgttcgattcaaaagcatttctgaaaaccgtcaccagccagccaggcgtctaccgtatgtacgatgctggcggtacggttatctatgtcggtaaggcgaaagatctgaaaaaacgcctttccagctatttccgcagcaaccttgcctcccgtaaaaccgaagcgctggtcgcacttatacacaacattgatgtcaccgtaacgcatacggaaacggaagcgttgctccttgagcacaactacattaagttgtatcagccgcgctacaacgttctgctgcgcgatgacaagtcctacccgtttatctttctgagcggcgacacgcacccgcggctggcgatgcatcgtggcgctaagcatgcaaaaggtgaatatttcggtccgttcccgaacggttatgccgtgcgggaaacgctggcgcttttgcaaaaaatctttcctgttcgccagtgcgaaaatagcgtttatcgcaaccgctcccggccatgcctgcaatatcagattggccgctgcctggggccgtgcgttgaagggctggtgagcgaagaagagtacgcgcagcaggtggaatatgtccgcctgtttttagccgggaaagacgatcaggtgctgacgcaactgattgcccgtatggaaaaagccagcgcggcgctggaatttgaggaggccgcacgcatccgcgaccaaatccaggcggtgcgcagggtgaccgagaagcagtttgtttccaatacgggcgacgacctcgatgttatcggcgtagcctttgacgccggtctggcctgcgttcatgtgctttttattcgtcagggcaaagtgctcggcagccgcagctacttcccgaaagtgccgggcggcactgagctgggtgaagtggtggagaccttcgtcggccagttttatttgcagggcagccagatgcgtacgctgccctcggagatcctgctcgacttcacgctcgatgataaaaccctgctggcggagtcgctttcagagctggcaggccgccgggtgaatgttcagacgaaaccgcgcggcgatcgcgcgcgttatctgaagctggcgcgaaccaatgccgccacggcgctgaccaccaaactttcccagcagtcgaccgtcagccagcgtttaaccgcgcttgctacgctgcttaagctgccggaagtgaaacgcatggaatgcttcgacatcagccatacgatgggtgagcagaccgtggcgtcgtgtgtggtctttgatgccaacggtccgctgcgggcagagtatcgtcgctataacatcaccggcattacccccggtgacgattatgccgccatgaaccaggtgctgcgccgtcgctatggtaaagcgatagaagagagcaaaatcccggacgttatccttatcgacggcgggaaagggcagttggggcaggcgaaggcggtatttgaatcgctcgacgtggagtgggataagaaccatccgctgctgctaggagtagcgaaaggggcagatcgtaaggctggcctggaaacgctgttctttgagccggaaggcgagggctttagcctgccgccggattcccctgcgctgcacgtgatccagcatatccgcgatgagtcgcacgatcatgccatcagtgggcaccgtaaaaaacgggcgaaagtgaaaaataccagtacccttgagacgattgaaggcgtcgggccaaaacgtcgccagatgctgttgaagtatatgggcggattgcaaggattactcaacgccagtatggaagaaattgcaaaagtgccgggtatttcgcaagggctggcagaaaagatctactactcgttgaaacattgagggctctgtagcaacatagagctaaattttactgacaacagacagttaccgtcatcatgcgatttaatatccctacgttgctcactctttttcgcgttgtgctcattccgttcttcgtcctggcattttacctgccggtcgtctgggcgccttttgcctgtgcgcttattttcctgatcgctgccgtgacggactggtttgacggttatctggcgcgtcgctggaaccagagtacccgctttggcgcgttcctcgatccggttgcggataaggtgatggtggcaatcgcgatggtgctggtggcggaacattatcatacctggtgggtaacgctgcctgccgcgaccatgattggccgtgagattattatctctgccctgcgcgagtggatggcggagctgggtaaacgcagcagcgtggcggtgtcctggatcggtaaagttaaaaccaccgcacagatggcggcgctggtatggatgctgtggcgtccgaatgcctgggtagagtgggccggcattggtctgctgtgggttgcggcggtgctgacgctgtggtcaatgctgcaatatttgaacgctgcgcgcggtgatttgcttgaacagtgatcgtttcggcttaattttcagcaaacgatcctgagatgcaaaaaataacgttgactcaaaacgtcatatcagtagaatgcaacgcatcgaacggcggcacagttagccggacgacaatgaaatcaagtggttaggaagtagttaaatagttacttgatgacatgcgggaatagctcagttggtagagcacgaccttgccaaggtcggggtcgcgagttcgagtctcgtttcccgctccagattaatgcatcggcagcttgcgggtgcaggtcgaaagacaacagatttaaggcgcgttagcaaagcggttatgtagcggattgcaaatccgtctagtccggttcgactccggaacgcgcctccactttcttccctggccggatggtggaatcggtagacacaagggatttaaaatccctcggcgttcgcgctgtgtgggttcaagtcccactccggctaccatgggaaaatgcagaataatcaaagcaataagcagtgtcgtgtaaaccaccgaaaggtggttttttattgcctaattttcgccattcgccattctttcgccattcggcttcgccacaaacagagggcattactgccccccgactaaccgtggttgagttcctgatggttaatcaggttgcaggaggtgcctatacacctgcaatgttaatgggttccaatcttataatgcaacttcccgggacgggaccgctgaggattgtataatcctcccgggcgtgaatggatatactcacgcccgctaaactcatcgcactaaatgcggggatgtccatttattcaagggtaagaatgactttacctatgtggtttccggcctcaagtaattcatgtgctgtccggacatcttcaaatttaacaacccggtgtatgacaggtttacactttcctgattcgattaaaggccatacattttgtatcagctgttgggctatttctcctttttccgcgttattccgactcctcatcgttgagcctgttaccagggctcttttaaggatgagctcctgaatatcaaactccttaacaacccttccccccataaaaccaatcagcacgagtcgtccgtcttttttcagaatatgcagatttttgttgaaatatgaggcaccgacaatgtcaagaataacatcaacccctttcccgtcagttctgcccaggatctcttcttcaaaattctgtgtcctgaagttaatcatctccccgtactttttcagagcgagaacttgctcatcacttcctacggtaccgaataatttaatattcatggcagagcataaggcgagggcggttgtcccaataccgcttgcggcaccatggattagtacaacatctccaggtttcactttccccagagcaaaaagattggcccatacagtaaagtatgtttcaggaagtgcagcggcttccgtaaggcttaagttatttggcgcaggcaacacctgactgaccggaacggcacaaaattcagcatatccgccaccattggtgagcgcacaaacacgatccccgactgaaaagtgagtaacgtttttcccaattgcatgtacgatcccagcaacttctagtccagggacaggggtaacaccctccggcataggatatttcccttccctctgcataatatcaggacgatttacccctgcggcttttactgaaatgagaacctcgttctcaccacattccggtattttgccctggcttactttaagcacttcagggccgcctggttttgttatctcaatcaatttcatctcatctatcctgttaacgttcaagaggttgagttcagaacttaacatcagtaactaccagctacagacatcattcaaaattgctccgaatcaatttgaggctttttataaaaacgggggattcgcaatcgtgaatctcagtctaattctggcgtcaataatcgagaagtgacaccacgcgcatggctgtcagcttcgctgaaaatgggttctgtcctgtgatcagtcgcccgtcaacgacaacgttgggggtaaatggtagcaaagccttctcatatctggctcccctttgcttcatctcctgctgcgcgttgtatggcatctcacgggagacacccgctagaatttcctctgtccatgaaaagccagtgattctacgggacttaacgagaagctcaccatcagataagcgggtattcaacagaccgcaataaccatggcaaacagaggacacaatgcctctctgttcatgaatatctcgcgtaatttgctgaagcctaacattttctggaaaatcccacataacagcatgaccaccagtgaaataaattgcgtcatattcagaggagtcgatttgctcaggactgagagtattctcaagaagttccattctggaaggatcactaagccagttccgagtagaattatctaaaaatggccacttgagggatcgtggttctaagggggactggccacctgctggactcacgattatttgtctgaagccgtgagctgcaaaaatatcgtacgcatgagtgagctctgacagccaaagcccggttttatgctccgggtcgtcataatgagatacattggtaacaacatgtaatatagaccgaatcatgctagaaccttctggtgtttgtcagagattgttgttaacaaccagccagagtggttagtcatctttatttaacgcagatgttgctttccattcagtgtataaattttccaggccctgccgataagttgttatacgaaagtccgggaaacgtgacttaaattttgaagaatcaaaaagattatctgcttcatagcgcggaaggagctctcgcaattctcgcggccctttagaaaatatacctgcgatgtataaggggattttattgagaacagaccatgaggtctcttttccaaaaacactgcatgcctgagaaacaaattgcgtatatgtaattggttcttcgcagcagggcagatgccaggtctggccataagcatctggagtattacccagcagcgctaaagccctgctggcatcgggggtccagatgagcgttcgtaatgtgtcatcacgcaatgggacgagtggtttttttcctgctttaagcctgtctaaaaccagagcatttgtaaaactttgggttttcccgggcccataaaattcaggggcacgaccaatgagtacaggaatctcaccccgcagcatctcctctagcaccatgttcgccatcattgcccggacacgcccttttctcccagatggctgaaacggcatgtcttccgtctgtcgtctgctgtcctgagggtacatatacgtattgtcaaaatagacaaaatgagcccctacttgccgggttgcattcagtgcattctgaagcatcaccggaaattgcctctcccagagggaggaatccggtggtaggcctgctgcaaaatacacaatgcggctaccttttaccgcattcagggtctgactgccatcaagcaaatcagctgacataagggtatcagtgtcattgaccttatgcggattgcggctgacaagccttaggtcagcactgaaggaatgtgttaactcgcgggcaagttcccgggcaatctgtccgcttgctcccagaatcgtttgcatttatttcctcttcatacaatttttggctgatgtaccgggacattgacttttttaaaagtataagattaaagttaactttaatgtcaagaaattcaccggagatgaaatgaagataggagatctggcaaaagcgacgggtctaacaccttcccgcatacgttattacgaggcggaaggcctgatcagtgctcctccccgacaggataatggctatcgccattatccgcctgagaccgcattgatactcatgcttattgaccgggcacaaagatttgggtttacgcttgagcaaatccgtcaggtattacctcaggggaaaggaagctggaaccatgaaggattagttgcttctcttgaatccagggttgaggagatccgactcctacagcagcaactgagggaaaatcagaccatgatactgaatttaatcagtggcatcgaaaacaggccggagggtatttcatgccaggaaaatatgttgcgggttatgaggctgatgcaggttgatgcgccggttcttcattctattaagtaatctggcagacattgtgccagatctgtttcagtatgaagagttaattaacaaagcctgatttgtaagacacggctcccttgtacacaaccatgatgactccgtcaccggtacaaaataccggtaacggagtaaagaatttagatattttatcagccaggttaactgtttataaatgcaagaagatctgcgttaacctgatcagcgtgtgtagtgggtatgccgtggggagctcctttataagtattgagtttcccatttttgaccagttcagccgacaacttaccggaatcatcataagggacaacctgatcgtcatcgccatgaatcaccagtacagggatggatattcctttcaggtcttcagtaaagtcggtttgcgaaaaagcaacgatcccatcgtaatgcgctttggcgctccccatcataccctgtcgccaccagttataaataacagcttcggaaggagccgaaccggagcggttaaatccataaaaaggtccagcaggaacgtcgtaatagaactgggcgcgattagcagccagttgcgcttgcagatcatcaaatactgatttgggcgttccctgtggattattgtcggttttcaccatcaatggcggtacggcactgattaacacggcttttgaaactttatcttcaccatgtctggcaatataacgtacaacttcgccaccgccggttgaatggccaacatgcattgcgccctgtacattgagatgttccacaacggctgcaacatcatctgcataatgatccatgtcgtggccatcccacacctgttccgaacgaccatgcccacgtctgtcatgtgccacaacgcggaagcctttatttacgaagaataacatctgggcgtcccagtcatcgctactcagaggccagccgtgatggaaaaaagataacttgaccatcctttggaccccagtccttgtagaagatttcaacgccatcgcgagttgttacataacccatgtcacttctccactcagataaactgtcattgggcagtgcttatcctgctcaactcttcgtaaagggcagaactaactgataagtaccgatcctgttaccggccttgattcaaccgtaactgtagtataggtttaannnnnnnnnnnnnnnnnnnnnnnnnnnnnnnnnnnnnnnnnnnnnnnnnnnnnnnnnnnnnnnnnnnnnnnnnnnnnnnnnnnnnnnnnnnnnnnnnnnnnnnnnnnnnnnnnnnnnnnnnnnnnnnnnnnnnnnnnnnnnnnnnnnnnnnnnnnnnnnnnnnnnnnnnnnnnnnnnnnnnnnnnnnnnnnnnnnnnnnnnnnnnnnnnnnnnnnnnnnnnnnnnnnnnnnnnnnnnnnnnnnnnnnnnnnnnnnnnnnnnnnnnnnnnnnnnnnnnnnnnnnnnnnnnnnnnnnnnnnnnnnnnnnnnnnnnnnnnnnnnnnnnnnnnnnnnnnnnnnnnnnnnnnnnnnnnnnnnnnnnnnnnnnnnnnnnnnnnnnnnnnnnnnnnnnnnnnnnnnnnnnnnnnnnnnnnnnnnnnnnnnnnnnnnnnnnnnnnnnnnnnnnnnnnnnnnnnnnnnnnnnnnnnnnnnnnnnnnnnnnnnnnnnnnnnnnnnnnnnnnnnnnnnnnnnnnnnnnnnnnnnnnnnnnnnnnnnnnnnnnnnnnnnnnnnnnnnnnnnnnnnnnnnnnnnnnnnnnnnnnnnnnnnnnnnnnnnnnnnnnnnnnnnnnnnnnnnnnnnnnnnnnnnnnnnnnnnnnnnnnnnnnnnnnnnnnnnnnnnnnnnnnnnnnnnnnnnnnnnnnnnnnnnnnnnnnnnnnnnnnnnnnnnnnnnnnnnnnnnnnnnnnnnnnnnnnnnnnnnnnnnnnnnnnnnnnnnnnnnnnnnnnnnnnnnnnnnnnnnnnnnnnnnnnnnnnnnnnnnnnnnnnnnnnnnnnnnnnnnnnnnnnnnnnnnnnnnnnnnnnnnnnnnnnnnnnnnnnnnnnnnnnnnnnnnnnnnnnnnnnnnnnnnnnnnnnnnnnnnnnnnnnnnnnnnnnnnnnnnnnnnnnnnnnnnnnnnnnnnnnnnnnnnnnnnnnnnnnnnnnnnnnnnnnnnnnnnnnnnnnnnnnnnnnnnnnnnnnnnnnnnnnnnnnnnnnnnnnnnnnnnnnnnnnnnnnnnnnnnnnnnnnnnnnnnnnnnnnnnnnnnnnnnnnnnnnnnnnnnnnnnnnnnnnnnnnnnnnnnnnnnnnnnnnnnnnnnnnnnnnnnnnnnnnnnnnnnnnnnnnnnnnnnnnnnnnnnnnnnnnnnnnnnnnnnnnnnnnnnnnnnnnnnnnnnnnnnnnnnnnnnnnnnnnnnnnnnnnnnnnnnnnnnnnnnnnnnnnnnnnnnnnnnnnnnnnnnnnnnnnnnnnnnnnnnnnnnnnnnnnnnnnnnnnnnnnnnnnnnnnnnnnnnnnnnnnnnnnnnnnnnnnnnnnnnnnnnnnnnctgcaagcagttaacagcaatgggatgataaatgctattttcttcatgaaactactctaaacaggtaaaggataatggtacgcagtatattaaacggtttacttcaacggtcgctcaataatcaactaaaagttgatggactctgaagttatcaaatgccataccacgctctgtgcaacagtgtggcgtggttgactggtggttgttcatgcccgtgcagccagcgagcatagtggatatatgcttaaagaccaagttgaagaactgtgggcgaatcggataccagccacatgtcggattactgtgagtttttctcactatagccttttcgtttcacacgccacccagatacgcctttctcacctccggatccttcagcaacgcctcgccgctgccgcttaaccgaatctgcccgttaaccatcacatagccgcggtcggacaacttcagcgcgtggtgcgcattctgctcgaccagaaaaatcgtcattccgttacgggccagttcgcgcagcgtctggaaaatctgtttaaccacgattggcgcgaggccgaggctgggttcatccagcagcagaagtttaggacggctcatcagcgcgcgggcgatagccagcatctgctgttcaccgccggagagcgtcatcgcccgctggttacgtcgctccttgaggcgggggaagaggtcgaacatgctttgcatatcttccgctgcatgctgattgccgacggggattgtccccatcagcaggttctcttctacagacatatccgggaaaatgcgtcgtccctcaggtgcctgcgcgatgccaccggtggcaacatagtgggtggatttgtggctgatatcctcgccgcagaagaggatctgcccgttgcggatccggggctgaccaaagacagacatcagtaatgttgacttccccgcgccgttagcgccaatcagggccacggtttcccctttgttaacctcaagcgaaacctgcttcaacgcctggatcaccccgtagaaaacatccacatcctgaaactgaagcatcggttcgctcacagatttacctcgctttcgtcggtgcccagatacgcggcaatcactttttcattgtgctggatctcagccggtttacctctggcaatcacatcgccatgatcgagcacaatgatgtcatctgaaatgcccatcaccatccccatatcatgctcgatcagcaaaaccgtgatgtcatggtggtcgcgcaggaaccggatgatctcactcagcttgtgcgtttccaccgggttcaggccggcagcaggttcatcgagacaaatcatctccgggccggtacacatggcgcgggcgatttcgaggcgtcgttgctggccataggacatttccccggccagacggttcgcgcaatccaccagatccaccacctccagccagtaaaacgctcggtccagcgcatcgttctctgagcgacgatacgcaggggtgttcagcacccccgccagcagattgcggttgacgcgcatgtgctgtgccaccagcaggttttccacaacggacatctcgcggaacaggcggatgttttgaaacgtgcgcgcaagacccgcgcggttcaccagatgcgtgccgccaaacatcttatagaacaggcgttgaccaagctgcgccgggttgagccagtcgcccggctggaatttctggccgagcacctgaatgacattggtggttttatttcgtgcattgaacagaatgttgccgccggaggcccggtagaaaccggtcaggcagttaaagacggtcgtttttcccgcgccgttaggcccaatgagtgcggtaatggagccgcgctgcacctcaagattgacgtcgtttaaggccttgatcccgccgaagtgcatcatcagatgttctacacgtaaaatcgttgcgttcatggcgccactcctttacgcacggcaaatccgctgcggttgatgcggatcagaccgcgaggacgccagatcatcatcaccaccatcagcatgccaaacagcagcacgcgatattccgcaaagctgcgcagcagttccggcgtgacggtcagcacaaaggcggccagtacaacgccgacggtggagcccatcccgcccaggaccacaatggcgaggatcagggccgattcaaaaaaggtgaaagaggtcgggttaacaaatccctggtaggtggcaaaaaacactccggcgatacctgccgtcgatgcgcccagggtgaaggccgagagtttgaccagaacgtgattcagccccattgaacggcaggcaatctcatcctcacggagcgcttcccacgcccgtccaatgggcattcgggtcagccggtgtttaatgtacagcaccagcatgactaccaggaacagcaccgcatagatgaagataaacttcaagttggggttataggtcaggccgaagaactcgtggaaggggacgccgccttctttggcgcgtcggccaaactccaggccaaaaaaggtcggggcaggggctgaaacgccgttaggcccgccggtgaaggtgagccagttgttcagcaccaggcggatgatctcgccaaacccaagcgtgacgatggcgagataatccccgtgcatgcgcagcaccggaaagccgagcagggcgcccgcgcccgcggccattagcgccgccagcggcagcatgctccagaacccaagccccaggtactgatacccgagcgccagcccgtaagcgccgatggcatagaaggcgacataacccagatccagcagccctgccaggccaacaacaatgttcagcccaagaccgagcaggacgtagatcagtccgagaatggcaaccgtcagaacgtatttagtggccacaaacgggaagcagatcgccagcgtgacaatcagcggaatgatccagcgcatgcggcttttatacgccggcggccggacatacacccccgcattgtcggattcaaaccgcgcctgtaaacgtcttccggccgccgtagctgaaaaggcgctcagcaaaaaacgtcctaccatcaccgtgcctacaatccacgccagccgctggccgtcaaaggtaaagctgtaaccatccagtatcacgcccgcaatcgggccgaaaatgatcagggcgatcattccggaaaaaatcgagtccagaatgcagcgcttcagggaaaaaccgtcagaggtcatcgcgttgttccttacactttagccacgacagggcggcccagcagcccctgaggacggaagatcagaattaagaccagcaatccaaacgagaacacgtctttataatccgagttcaccatcccggagaattgcgcttctgcgacgcccagaatcagcccgccaagcatcgcgccgggcagagagccgatgccgcccagcaccgccgccgtaaaggccttgatgccgataacgaacccgacgtaaaaatcaaaggtgccgtaattcatggtgatcagcacgcccgccagcccggccatcgctgcgccgataacaaacaccagcgaaataattctgtcggtgttgatacccagaatggaggccatcttacgatcctgctgcaccgcacggcacatgcgtcctaagcgggtacggttgataatccaggtcagcaccagcatgcccgcgaacgaggcgatgagaataaagactttggtataggttatctggacaaacccttcgccgaggtgaaaacgcagcacgccatcaagcatggtgggcacgccctgctgccgcgggccctggctgagctggacgtagttttgcagtatcaacgacatcccgatggccgaaatcagcggtgccagacgcgtcgagttgcgtagcggcttataggcgatgcgctcaatcgtccagccataaacgccggtgaccacgatggtgaaaaccagcgtccccaggatcagcagcggaaaggagtggagtccaaaaaacgccagcagggccaggccaatggccgagagataggcggagatcatatacacttcgccgtgggcgaaattgatcataccgatgatgccgtacaccatggtgtagccgatggcgataagaccgtagaccgaacccagcgttaagccattaattaattgttgcaggaagaatgtactcatggtcgcgcacctgaataaagggttacgccgacagtcagacctgccggcgttgagcagattccgtcccgttatggcacttctttatatttgcctttgtcatcccactgatagaccacgtagtcagagactttgaggtcacctttgctgtcccaggcttttttacccatcaccgtgtcgacagggttggccttcagccactcgctggcttttgcggaatccgtcccttgcgtggccttgaatgccgccgcgatagcctgcacagacgcgtaggcgtagagggtgtatccttcaggttcaaatttaccggtgcggaatttctcgatgacggcttttccgtccgggatcaggcgtggatctttaccgaaggtcatgtaaataccgttggtgtattgcgccccaccggcggcggtgaccatctcttcattgacgatacagtctcccgagaagaacttcgcctgcacgccctgttcacgcatctggcgaaccagcgggcccgcttccgggtgacagcctccgaagaacaccacgtccggtttttgtgcgccaattttggtcaccagcgcgttaaagtctttctccccgcgggataacccttcgtacatcacctccttcacgccgcgtttcgccagcgccgccttagtggcgtccgccagcccctggccataggtgtctttatcgtggatgatgaccacccgtttggctttcagcttatcaagaatgaaatcgctggcgacctggccctgctggtcgtcacgtccgcacatgcgaaatatatcgctcatgccacgttcggtaataagcgggttcgttgagccgggggtgatggagaggatcccggcatcgctgtagacctcggaggcgggcatggtcgacgaggagcagaagtggccgacgaccgctttcaccttatcctgatcgactaagcggttggcaacggcgacggcctgtttgggctcgcaggcgtcgtcgccctgaaccagtttgattttctcaccgttgatcccgccggcggcgttaatgtcttccgccgcctgcgtagcgccatgccagtattgatcgccgtaggttgcgttcgggcctgtgaacggcccggccacgccgatgacgatatcggcctgcgcggaaaaggccgtcaccagacaaccggccagcaccagggagaggggagttttggtaaatttcagcgacattattatgttccttagcaaagaggtttttgcaccaggtataaacccgaacgcctgatggcatcgtaaatccaaaaacaagagcgagaacaaaatgcactttagaagcaatctcatgcttaatacggcgaggatcccacgcaccgcgaagcgcgcagaacattaagcaaaaaggttgccagaatggttaatcccttgaccgggtcacaacacgttgagtatagagcgccgttttatgcgcctttgcgggatgagatgaatttacagcggagatcacatctccttaacaacaaagcccataagttgtgcaacggtcacgatttgcacgtttttgcagcaataaagacctaaacttcagataggcacgcgcggcgatatatgtcaggatcgttttttttatcaggagtatcagcaatggctgaaggcccattaaatgaaagcgagatggcgtggctggaagagacattaatctcttacggtcacgacgatgcatccgtgattgacgtgtccgaactggacggcatgcttaccgcagtactttccggtcccgttgtggtggagcccgacacctggctggtggcggtctggggtggtgagaaatatattccgcgctggaaaaacgatcgtgagatgaaccgttttatcgatctctgctttaagcacatgaacgatattgccgagcgtttgagcgaatacccggatcagtttgaaccgctgtttggctataacgacgttgacggtcagagctataccgtggtggaagagtggtgctatggctacatgcgcggcgtggcgctgacggactggtcatcccttccggaagcgctggaagcggacctggcggtgattgccctgcacgggacggaagagaacagcgagaagctggatgcgctgaccgaagaggagtacatggccagcatcgaaagcattcagcctgcggcgctgcgtttgtataactactgggtggctaacccgcagcagccggaagcgaaaaagccgatcgtgaacgggtcgaaggtggggcgtaacgatccgtgcccgtgcgggagtgggaagaagtttaaaagctgctgcctgcattaaatcaattattactgtggcctgaatggggcacgggtgttgagtccccgctaaaatcggcgaaccggagaccagatgacaagggctggacgccatggatggcggccagaggcgaatcgagacaggatgtcgagttgagccgaccgcaggcagatggtcgggaggtgagcgcagtgcgaagcaccgattttccgcggggccgcggggattgataagggggccgcggcggccccnnnnnnnnnnnnnnnnnnnnnnnnnnnnnnnnnnnnnnnnnnnnnnnnnnnnnnnnnnnnnnnnnnnnnnnnnnnnnnnnnnnnnnnnnnnnnnnnnnnnnnnnnnnnnnnnnnnnnnnnnnnnnnnnnnnnnnnnnnnnnnnnnnnnnnnnnnnnnnnnnnnnnnnnnnnnnnnnnnnnnnnnnnnnnnnnnnnnnnnnnnnnnnnnnnnnnnnnnnnnnnnnnnnnnnnnnnnnnnnnnnnnnnnnnnnnnnnnnnnnnnnnnnnnnnnnnnnnnnnnnnnnnnnnnnnnnnnnnnnnnnnnnnnnnnnnnnnnnnnnnnnnnnnnnnnnnnnnnnnnnngcggcgccccttatcccgttcacatgctgtgaaaaaattatattctgttgatcttaaggtgaacggaacagtacctcaggacctgtataaataagttatcccacttccggcagcatccccgctgcaatcagcacctgcaccagaataatcacaaccccacaaccaaacaccgcgcacagtattggcgtaccgcccgctacgcgatacccctgctgcggatgttgctggcggctcttccacgccagcagggaaggcagcagcagggccagtaccgataacgccacgccagcataccccagcgccatcacaaacccgcgcgggtaaaagagcgcgaaggccagcggcggcaggaaggtcatcgcccccgtctgtaagcgtcccgcaacggtattgcgacgctggaacagatccgccatatagtcaaacaggccaagcgccacgccgaggaaggaggttgccagcgccaggtctgcaaacagatgtaccgctagctccacgtgtgaagaggccaccacgttacgcagggcaaccaggaatccattcagaccagaatgctctgccatcagtccgataaaggtattggaatcaatactgcccagcgtcaccagctgccagaacaggtaagcaatcaacggaatggcgctgccgataacaaagacgcggcgcagcttgcgaatatcaccgttcatatagctcacgatgctcggcacgctgccgtgaaaaccgaaggaggtgaaaataaccgggatggccgaaagcgccagacctttctccagcgggagggagagcaggttaaccttgtgcacatgcggtgccagcagcaccagcatcacaatcaggaagagaattttggcgctgaacaaaaaacggttaaacagatcgaccagcgatgtgcccgcgcaaactacgccgccaccgatcaacgtaaagacaatggcacctgtttccggtgaaagcgacgcaccgaagccgtcattgatacttgacgcaatcagctccccggcgccgctgatgtaagcggcagtcagggcgtacatcaggaacatcatgctgaaaccggtgatccactgcccgtagcgtccaagatagcgtgcagccagggagcctaagccagtatcggcagggacatgctgataaacctccagcaataatagcgcggtgtaacacatcagggcccacagaccgccaagcagcactacggtaaccccaaacccgacgccggcggcagccaacggcatggccaacattcctgcgccaattgtcgttccggcgacgataaaaatacttcccagagttctgttcttcacgctttcctctacaacgcttccataccgcgactcattctgcggcgcagagtaagggaaaagcaccatctcgtcaaatcaccgttacatggggtgtaatgattaatttacaaaaagaaaagggtaacctgagccagcgcaaagcgtgccgtggagggaacgtttagtctgctttttatttgcgagaggtaaccatgtcaattcacggacacgacgtgctgaatatgatgattgagtcaggtgagcgctatacggaggagagtctggttgaggcgatacatgcccgctttggcgaagcggcgcgtttccatacctgttcagcttcggagatgacggccgcggagctggtggcgtttctggcggcgcgcggaaaattcattctagcagcagacggattttccactcacgaaagtaaaatctgccgccattaaataatgcggtgctgaaaactcagcaccgcttttctgttaattctgggtatcgagcgtcgacagctctttatcaatgaagtacagaccttccccggatttacctgccagagataatttatccagcacggatttaaacagcttctcttcttcgtgctgttcagccacataccactgaaggaaattaaaggttggataatcctggctggtcatggcggcatgagccagttcattaattttctgggtgatcagctgttcatgctcataggtggcgcggaacagttcatcaagagagccgtattcggcaaaaggcgatgccacgttatcaatgcgcggcaggctgccggtgtccgtcaggtaatcaaacagacgctgcatgtgcgtcatctcttcctgggcatgacgacgcaggaaggcggccgccccttcaaagctgtgatagctgcaccaggcgctcatctgctgataaagcagggaagaaaaaagctcaagattcatttgcgcattgagcttgtcgatcatttcagtttttaacatggtgcagctccggtttattaattctggttcacgatgagcgacactataatttgttatttaattatttgcaaaaagtaaaataaatatttctttattaaaaatacgaatgggaataaaacgcattgccgtcatttatatttattaatgagaattgttttagttcttattaaataaactgccagcgtgactggcagtagcggttaataccacggattctggctggaagaggtaacagcatatccctgacatttatactgaatggtcacactttcgttcagacagagtgaaccgctgatcagggtgcaggttttaattggctgcccgtaggctgacgcagtggcgtagcccatatgttgacaggctttggttgccgtaccgttattaacatactcatcagaccaggcgttttgcagcatggcctggccatagtcgaggcgcacaattccgtttggggcatccgtactgctgacttctgcctgacggttgatactgcacccggcgagcaacaggatcgttccggctatgattacacgtttcatggttcactctgcgtgacgggaaatacgccattgtaaccaacgcgatggtacgcaatggctggaatagccggaggatctgccctctcactgtgcaacgagccgggccagcgcgcgaaattgtgagcgcatctttgttttttaaaacaagttttcacttaatttgaaagtgcgtttgtttgatagtaaggttaagttgaaaaggtatccacagcgggatcgcccgccatgcattcaggagagacaagatgaaaattgcactgatgatggaaaacagccaggccgctaagaatcccatcatccttaatgagctgaaagccgttgctgatgagaaaggttttccggtctataacgtcggtatgagtgatgagaacgatcatcatctcacctatattcacctgggcatcatggcgagcattctgcttaacgctaaagccgttgattttgttgttaccggctgcggtaccgggcagggcgcgctgatgtccctgaacatccatccgggtgtgatttgcggttactgcatcgatcctgcggatgccttcctgtttgcgcaaatcaacaacggtaacgcgctctctctgccgtttgcgaagggcttcggctggggggcagaactgaacgtacgctttatctttgagaaagcgtttaccggacgcaatggcgaaggctatccaccagagcgtaaagagccgcaggtgcgtaacgccgggatcctgaaccaggtgaaagcggcggtggtgaaagaaaactatctggataccctgcgagcaatcgatcctgagctggttaaaaccgccgtatcaggccagcgcttccagcagtgcttcttcgagaactgccaggacaaagagattgaagccttcgtgcgcggtattgttggctgatttactttgccgggcggtgcgttgcctgcccggcagatagcgttactttttcgatgagaccgcgctgcccgcatctttagtcagccgcagcgtgtcaaccattcccaccaggcagatcagcgcgattgccacaaatgccagccggaagctcattcccggcataccggcaatccccatcgcctcactgactttttccccgatacgaataccaatcgccccgagcgtgatcccaagccccacggcaagctgcgttgcggttgaaaacagagtattggcatagctcatctgcgccgatggcacatccgcaaaagccaacgtactgatggctgtaaactgaatcgaacggaaaacgccgcccagataaaggatcagcatgatgagccacgcgggcgtctgcggcgtaagaaacgcgcaggccagcaacgccaggacattcaacgcaccgttaatcagcaacagccgcttaaaccccaggctgcggataagcggcgtcgtcgccggtttaatggtgagattgccaacgaaaaccgccagcaccagcaggccagaatggaacgcgtccatgccaaagccgacctggaacatcagcggtagcaggaacggtaccgcgctgatggaggcgcgaaacagcgatccgccgtacagggtgacgcgaaacgtcggcacctgcatcgcatcgagcctgatcatcggccaggttgcccgcttaaagtgacgcagcgccaggcttaacgcgacaataccgacgataaacagcgtggcggttaatcctgtccgcagtggctctccgcccatcaactccatcgcataaaccaggctcaccatggcaagggtggtgacaacaaaacccggtaaatcgaacggtcggcgcgtatcttcatgcaggtctggaatgatgcgcagcgccagcaaaatggcgattatccccagcggcatgttaataaagaagatccagcgccagtcggcatagctggtaatgaacccacccagcggcgggccgatgatcggcgcgaccagcgcaggccacgtcagggtggcgattgccgtgatgagctgatgttttggcgtggtgcgtagcacggccaggcgacctacgggcaccatcagcgcaccacccatgccctggaggacgcgcatcgcgacgaactgatcgagcgtggtggacaggccgcaaaataccgaggccagcgtgaagatcgccagcgcgagggcaaacacttttcgcgcgccgaagcggtcggcgatccagccgctggcggggatcagcacggccagggtgatcagataggcgctgatgccgatattcagatccaccgcttggtggccgaagctttttgccatatccggcaacgcggtggcgatcaccgtcccgtccagaaactccataaagaaagcaccggccaccagcagcgccgcaggcgataatccacggctctctttgccggatacgttttcactcattctcttcctgcccgctcaaaaaattttataaacatttactggaatttataagcctgtaacgtgcggatttatcatggctttttttaacaaaccagcagcactgagggtttaataaccgtgatgcaggtcacaaaatggttgatttttgtgatggtggtcatattataagcgtattgacaataacacctgcataacacgttactggagcaacataatgaaactgcgcaaaatcctgaaaagcatgtgggcaaactactgcacaacgtttaannnnnnnnnnnnnnnnnnnnnnnnnnnnnnnnnnnnnnnnnnnnnnnnnnnnnnnnnnnnnnnnnnnnnnnnnnnnnnnnnnnnnnnnnnnnnnnnnnnnnnnnnnnnnnnnnnnnnnnnnnnnnnnnnnnnnnnnnnnnnnnnnnnnnnnnnnnnnnnnnnnnnnnnnnnnnnnnnnnnnnnnnnnnnnnnnnnnnnnnnnnnnnnnnnnnnnnnnnnnnnnnnnnnnnnnnnnnnnnnnnnnnnnnnnnnnnnnnnnnnnnnnnnnnnnnnnnnnnnnnnnnnnnnnnnnnnnnnnnnnnnnnnnnnnnnnnnnnnnnnnnnnnnnnnnnnnnnnnnnnnnnnnnnnnnnnnnnnnnnnnnnnnnnnnnnnnnnnnnnnnnnnnnnnnnnnnnnnnnnnnnnnnnnnnnnnnnnnnnnnnnnnnnnnnnnnnnnnnnnnnnnnnnnnnnnnnnnnnnnnnnnnnnnnnnnnnnnnnnnnnnnnnnnnnnnnnnnnnnnnnnnnnnnnnnnnnnnnnnnnnnnnnnnnnnnnnnnnnnnnnnnnnnnnnnnnnnnnnnnnnnnnnnnnnnnnnnnnnnnnnnnnnnnnnnnnnnnnnnnnnnnnnnnnnnnnnnnnnnnnnnnnnnnnnnnnnnnnnnnnnnnnnnnnnnnnnnnnnnnnnnnnnnnnnnnnnnnnnnnnnnnnnnnnnnnnnnnnnnnnnnnnnnnnnnnnnnnnnnnnnnnnnnnnnnnnnnnnnnnnnnnnnnnnnnnnnnnnnnnnnnnnnnnnnnnnnnnnnnnnnnnnnnnnnnnnnnnnnnnnnnnnnnnnnnnnnnnnnnnnnnnnnnnnnnnnnnnnnnnnnnnnnnnnnnnnnnnnnnnnnnnnnnnnnnnnnnnnnnnnnnnnnnnnnnnnnnnnnnnnnnnnnnnnnnnnnnnnnnnnnnnnnnnnnnnnnnnnnnnnnnnnnnnnnnnnnnnnnnnnnnnnnnnnnnnnnnnnnnnnnnnnnnnnnnnnnnnnnnnnnnnnnnnnnnnnnnnnnnnnnnnnnnnnnnnnnnnnnnnnnnnnnnnnnnnnnnnnnnnnnnnnnnnnnnnnnnnnnnnnnnnnnnnnnnnnnnnnnnnnnnnnnnnnnnnnnnnnnnnnnnnnnnnnnnnnnnnnnnnnnnnnnnnnnnnnnnnnnnnnnnnnnnnnnnnnnnnnnnnnnnnnnnnnnnnnnnnnnnnnnnnnnnnnnnnnnnnnnnnnnnnnnnnnnnnnnnnnnnnnnnnnnnnnnnnnnnnnnnnnnnnnnnnnnnnnnnnnnnnnnnnnnnnnnnnnnnnnnnnnnnnnnnnnnnnnnnnnnnnnnnnnnnnnnnnnnnnnnnnnnnnnnnnnnnnnnnnnnnnnnnnnnnnnnnnnnnnnnnnnnnnnnnnnnnnnnnnnnnnnnnnnnnnnnnnnnnnnnnnnnnnnnnnnnnnnnnnnnnnnnnnnnnnnnnnnnnnnnnnnnnnnnnnnnnnnnnnnnnnnnnnnnnnnnttatgccgtgacagagtagcaaggaacataaagtgaacggaatgaccaccagagccgtatgttccccctcaccccagccctctccctcaagggagagggggccgtctgtgcaggcattattttgtggggaactctcagccctgacgggagcgggtgaaggacttagtggtgttgcacggtagcaatgtcgagaagatggcggtccgtctgctccagacaaatccccgcgcgtttcgcattgcggatttcatctgcgagcgtcttcagcagcatgccatcctgctgctgctctctgtccatatcacgtaaaaacttgagggtaatgatgtcccgttgcgctttggcttcatcagccagtttgctcagcttcgcacagcgttgctcatactcttcgagcgttttctgaaacagttcttccagagaagtgtaattatcttcaatcgtttcaagctctttgacggtagggtttgccccgacagctttcaaaaagttaaagacgcgcatcatgtgggtgacgttactttgcgcctgagtacgaaagaaggtggcagtgccgttgaggctttttctggaacaccacgcgctcaaatgcagatgcagatttgaagcataaaactccaggttcatctgggcattcagtttttgcatcatcgtttgggtagtcattctcatatccttattgactgtgggacttgatgtccgctacttaacctgacccggcaggtattgacgattgaatggcagaaatagatttctgcaaggtaaaaaactcgaaaattcacttcctgtgttcgattaaaataagcatacgcttctctttgacttaagaaaactcttaattgggctgtgtttaccatacattacaaatttaaatatagcccagaacagaaagagggttaagagattggatttaatataacttgttgattttaatgggtgtgaaattaatatcgctcatttttatcgtttcaggaaacgttctttggcgggaaattctgtaaaagtgttaaatcagaaataatatctgcaaatatatcctgtcgtatcaaatttgagctaaatcaattttcactcaatatacggttctgtgatcgcgtcgcaagattgtgatctgataaagagtgaaaatgaaacactgttttacatcgtttcattcgttgaggtttatgatggctaacgttgcggtgctgctggcacccggttttgaagaagcagaagcgattatcacgattgatattctgcggcgtttacagattgaggtggagacgctggcctgtgcggagtcccgtgcggtagtgagttaccacaatatccccatggtggctgacagtacgttaacggagcgcattaatacgctgtatgacgcagtcgtgttgcccggtgggccgcaggggagcgtcaatcttgcggctagcaagcaggtgctccgctttgtttccgcgcatgacgagcacggcaaactcatctgcccgatatgctctgcggccgcgcgggtgctgggcggtaacaggctactgaaggggcgtcgctacgtctgttccggcgatctgtggcagggcgttgatgagggagtatatgtggatgcgccggtcgtggtggataataacctcatcagcggcaaggggctggggcacgcttttgactttgcgctgacgctctctgctcgtctgttgggtgacgacgcccccgtgcgcgatcatgctgaacacatctattaccgctggtaatttttctgccgggcgctaaggcgtccgggttacagggatttcttagctgaccttatggataatcctgcttaactcccttccatttgtaggacaattacgtccttttttatgtcatttttcgctgaatttatgtacgcaattactgtaattctgcggtgtgatgtcgctctcttatggatgattaatttcccgctaaaactatctccagcaataacgcttatgacgaggtaagcgctaatgccttgttttaagtccgattaaataagtcgttcgccattattccctacagataagaatgctaaagctggagtttaccatgcacaaatttactaaagcgctggcggccatcggcctggctgccgttatgtcacaatccgctatcgctgaaaatttaaagctcggttttctggttaaacagccggaagagccgtggttccagaccgaatggaaatttgctgataaagccggaaaagatttgggatttgaggtaattaaaatcgccgtacctgacggtgagaaaacgctgaacgccattgatagcctggcggccagcggcgcgaaaggtttcgttatctgtacgccggatccaaaactggggtcagcgattgccgcgaaagcgcgcggttacgacatgaaagtgattgcggtggacgatcagttcgtgaacgccaaaggtaaaccgatggataccgttccgctggtaatgatggcggccactaaaatcggtgagcgtcagggccaggagctctacaaagagatgcaaaaacgcggctgggatgtcaaagagaccgccgtgatggccattaccgctgacgagctggacaccgcccgtcgtcgtactaccgggtccatggacgcccttaaagcggctggcttcccggaaaaacagatctacaaagtaccgaccaaatccaacgatattccgggcgcctttgatgcggcgaactccatgctcgtccagcatccggaagtgaagcactggctggtggtggggatgaacgacaacaccgtactgggcggcgtgcgtgcaacggaaggccagggctttaaagcaccggacgtgatcgggatcggcatcaacggcgttgacgccgtgagcgaactgtctaaagcgcaggcgaccggtttctacggctctctgctgccaagcccggatgtccacggctataaatccagcgaaatgctctacaactgggtggccaaaggggttgagccgccgaaattcaccgaagtgaccgatgtggtgctgatcacccgcgataacttcaaagaggagctggcgaaaaaaggactgggcggtaagtaatacgctgtgattgcgcccctcactcaccgtgaggggccagacgtacacactacaggaatcacggagtcgttatgcaacagtctgatccgtatctctctttccgcggcatcggtaaaacgttccccggtgtaaacgcgctgaccgatatcagcttcgactgctatgccggacaggttcacgccctgatgggggagaatggcgcgggaaaatccacgctgctcaaaattctcagcggcaactacacgcccaccaccggcacgctggccattcgcggcgaagaggtggcctttgccgacaccacggcagcgttaaacgcgggcgtcgccatcatctatcaggagctgcatctcattcctgaaatgaccgtggcggagaacatctatctgggccagcttccgcataaaagcggcgtggtcaaccgctcgctgctcaactatgaagcgggcttgcagctcaagcaccttgggctggatgtcgatccgcaaacgccccttaagtatctctccatcggccagtggcagatggtggaaattgccaaagcgctggcgcgtaacgccaaaatcatcgctttcgatgagccaaccagttcgctctcggcgcgtgaaatagaaaatctctttcgcgtgatccgcgagctgcgcaaagagggccgcatcattctgtacgtttctcaccgtatggaagagatttttgccttaagcgatgccattaccgtgtttaaagatggccgctacgtgcgcaccttcaccgatatgcagcaggtcaatcatgaccaactggtgcaggcgatggtcggacgcgatctgggggacatttaccactggaaaccgcgcgagtatggcccggagcgtctgcgtctggataacgtcaaagccccgggcgtgcgcacgcccatttcactctcggtgcgcagcggcgaaatcgtcgggctgtttggccttgtgggggcagggcgcagcgagctgatgaaagggctgtttggcgggacgcgcataacccagggccagttttttcgtcgacgggaaaaaggtcgatattcagaagcctgcgcaggcgataaacgcggggattatgctctgcccggaggatcgaaaggccgaaggcattattccggtgcactcggtgcgcgacaacatcaacatctctgcccggcgtaagttcatccgcgcgggatgtctgattaacgacggctgggaggcgagcaacgcggatcaccatatccgttcgctgaacatcaaaacccccggggctgaacagctgatcatgaacctgtccggcggcaatcagcaaaaagccattctggggcgctggctgtcggaagatatgaaggtcattttgctggatgagccaacgcgcggtatcgacgtgggggcgaaacacgaaatctataacgtcatctatgaactggcaaaacgcggtgtggcggtcctgttcgcctccagcgatctgcctgaggtgctgggcgtcgccgaccgcattgttgtgatgcgtgaaggtgaaattgccggtgaattgctgcatgaacaggcgaatgaacaacaggcgttgagtctcgccatgcctaaagttagccaggctgtcgcctgagtaaggagtcaatgatgtcctctgttactacatccggagcgccgaagtcggctttcagttttggccgcatctgggaccagtacggcatgctggtggtctttgctgccctgttcgtcgcctgcgcgatttttgtgccgaatttcgccacgttcatcaatatgaaggggctggggctggctatctccatgtccggcatggtggcctgcggaatgctgttctgcctggcctccggcgattttgacctgtcggttgcctcggtgattgcctgtgctggcgtcaccactgccgtggtgatcaacatgaccgaaagtctgtggatcggcgtgctggccgggctgctgctcggcgtgctgagcggcctggtgaacgggtttgtcattgcgcgcctgaagattaacgccctgattacgacgctggcaaccatgcaaatcgtgcgcggtctggcctatatcatctccgacgggaaagccgtggggattgaagacgagcgtttcttcacgctgggctatgccaactggctggggctgcctgcgccaatctggctgacggtaggctgtttgatcctgttcggtttcctgcttaaccgcaccacctttggccgtaacacgctggcgattggcggcaatgaagaggcggcgcgtctggcgggtgtcccggtcgtacggaccaagatcattatcttcgtgctttccgggctggtatcggcggcggcggggattattctggcgtcgcgtatgaccagcggccagccaatgacctccattggatatgagctgatcgtcatctcagcctgcgttttagggggcgtttccctcaagggcggcatcggaaaaatctcatatgtggtggcggggatcctcattctggggaccgtggagaacgccatgaacctgcttaatatttctccgttctctcagtacgtcgtacgcggcctgatcctgctggcagcggtgatcttcgaccgttacaagcaaaaagcgaagcgtaccgtctgatttatttttagccatcaatatgctcaactattaaccatagttgaccccctgaccggcccgccagttttgctgacgggccggttgccaaatggcgagcaccgtcacactgtctatacttacatggctgttttgttcactgtaaggaggattagggtggctgacttgttaaccgcaccgcctgtactgcccggaaaatttgctttcttttttgacctcgacgggacgctcgccgggattgaaccgcatccggatgacgtcgttgtaccggacacggtgttagagaatttgcagcagctctcccgacagaacgagggggcactggcattgatttcagggcgctcaatggccgagctggacgtgctcgccagtccttatcactttccgctggccggtgtgcacggagcggagcgccgcgatatccatgatcaactgcatatagtttcactccccgacacgctgattcaggcgctgcatacgcaactctcttcggctctggaaatgcttcccggtacggaactggaagccaaaggcatggcctttgcgctgcactaccgtcaggcgccccatcatgaggcggcgatatttgcggtggcaagaagcgtggcggaagcccatccggagctggcgttacagccgggtaaatgtgtggtcgagattaaaccggcaggaattaataaaggcgctgccattgcagcgtttatggcggaagcgccgtttaaagggcgtacgccagtcttttttggggatgacctgaccgacgaggccgggttcagggtggtaaaccaggcccagggcatgtctgtcaaggtgggatctggtgaaaccattgccggatggcggctggaaaatgtcgccagcgtctggcagtggatatctgacgtcgctaaccagcaacaacaacaaatagcgcaaaacaacgggagaaatcattatgggtcgcttagtcgtcgtctctaatcgcatcgcaccgccggatgataaaaaagccagtgccggtggcctggcggtcggggtattaggtgccctcaaagccgcgggtggtctctggtttggctggagcggggaaatcagtaatgatgagaaaccgctaaaaaaggtgtcacggggcaatatcacgtgggcctccttcgcccttagcgagaaggactacgatgaatattattccgagttctcaaacgccgtgctgtggccagcgtttcactatcgtctggatctggtgaaattccagcgtgaatcctatgaaggctacatgcgcgttaacgcgctgctggcagataaactgctgccgctaatcgaagaagacgatattttatggatccacgattaccatctgctgcccttcgccagggagctgcgtaaacggggtgtgaagaaccggatcggcttcttcctgcatattccgttcccgaccccggagatctttacggcgctgccgcagcatgatgaaattcttgaagcattgtctgattacgacctgctcggtttccagacggaaaatgacaggctggcgttcctcgacagcgtgtcgggtaaaacccggctggtcactcacggcggcaaatctcacaccgcgtggggacgaaatttccataccgaagtctacccgattggtattgagccagacgaaatcgccgagcaggcctctggtccgctgccgccgaagcttgcccagctcaaggacgaactcaagcacgttaagaatatcttttcggttgaacgactggattattccaaagggttgccggagcgattcctcgcttatgaaaccctgctggataaattcccgcagcatcacggcaagatccgctatacccagatagcgccaacctcgcgcggtgaggttcaggcttaccaggatattcgtcaccagctggagaccgaagcagggcgcatcaacgggcgctatggtcagctcggctggactccacttttctatctgaatcagcactttgagcgcaaaatcctgatgaaagtgttccgctatgcggacgtcgggctggtcaccccgctgcgcgacgggatgaatctggtggcaaaagagtatgtagcagcacaagatcctgctgacccgggcgtgctggtgctgtcccaatttgccggtgcggcaaacgagttaacctcggcgctgattgtgaacccttacgatcgcgatgacgtggcaaatgccctgaaccgcgcgttaaccatgccgcttgcggaacgtatttcacgtcattcagaaatgatggagaccatcgtcaagaatgatatcaaccgctggcaggcgcgttttattgacgatttgcgcgcgatccagccgcaaactcaggaaggtgatctgcaaaaaaagatcgcgaccttccctaaactcgcctgattttctccgggggcattaattgcccccgagaggcaccagcaggacatccacctggcttgacgaaacgatggattttgccgagcatgccgcccgggaaaaaaagctctggttatgatttccgcaaatgaccaggtcaacattctgtttctgacaaatgtcgagaatatgtccacttaactcgccggtggcaatcaccgtctggtggacaggatattttgcccgctcaaccagctcgcgcagaaattgctgcgtttcctcctgaagaacctcacgaatatcttccagcattggcgctgccagttgattatacatttcgggttcagcagccagggtaatcagacttatgcgggcattattcgggcgggcaatggaaacggcacgggcgacgagttgatgactttcgggggaaaccgcaacagaaacaagaagatgggagtaactcatcacacactccttttatgtcagaatgacacgtttctcaagctttaccgcgaatctgccgcttctgcaagaggcacatgcgacaatagtgtgaagcttatcataattattcattaattattcttataagaagaataacgaaatggggacgctaaatgaaagtaattaacaacttaacgtaaatcacacatttagccttccgtgctgttaaatcgcgttaaccgatcgtcaacgcaagcgtgatggttacccatggaaacttttttctcgaaaggaaaacttaagctgctgtttttacttaattaactccgcctcttctctggcgttcgcgcccgttgtgacgcgaaagggcagtgcttcttcgacgtagcaattttcatacccgatcccctcatccctctgcatgagtattcgttccataagaatataaacaagcttcagttgctcaataaatagtcaaattacaagtcacgctgatggatttatgggttacattcgcgtaaattatgtgacgtagatcacattttttttaaattccagggggggctgcattgtatgtgtcaaaactgacgagtagagtttgcgtcgaattaggaaaaatcttagttatttgtaagaaaagataaaatgtgtaaccgacattttggccatgttaaccggtcacgcgctttacgacgtacaaacctaaattcaactatgcatttggccttttctttttataccgggtgatttcccggcgacatcacggggtgcggtctttccgcataaaaataatagttggttattcgggatgggaaaaatgcatacatccgagttgctaaaacatatttatgacatcaatttgtcgtatttattgctcgcgcagcgtttgattagtcaggacaaaccgtcagcgatgtttcgtctgggtgttaacgaagagatggcaaccatgctgggtggattaaccctcccgcaaatggtcaagctggctgaaaccaatcaacttgtctgccagttccgttttgataacccgcagaccattacgcgtctgactcaggaatcccgcgtggacgatctgcaacagatccacactggtattcttctctccacccgcctgctcaacgaaatcagccagcctgatgacgtagcccggaagaaaagggcttaacaatgagcgaaaaaagcattgttcaggaagcccgtgatatccagctggcgatggaactcatcacgctcggtgcgcgtttacaaatgctggaaagcgagacgcagctgagccgtggtcgtctgatcaagctgtacaaagaattgcgtggtagcccgccgccaaaaggcatgctgccgttttcgactgactggttcatgacctgggagcagaacattcatgcttccatgttctgtaacgcctggcagtacctgcttaaaacgggcttatgcagcggcgttgatgccgtgatcaaagcctacaaactttaccttgagcaatgcccgcagcaggaagagggacccctgctggcgctgacccgcgcctggacgctggtgcgttttgttgaaagcggaatgcttgaattgtcccgctgcaactgctgtgacggcaatttcattacccacgcgcaccagcctgcgggcagcttcgcctgtagtttgtgccagcctccatcccgagccgtaaaaagacgtaaactttcccgggatgctgccgatattattccacaactgctggatgaacagatcgaacacgctgtttaacccgaacctgtgggcaagattccagcagcggtaagcgattaccgctgcttttttttaccctgcgttcaggtcatgcgctcgaaatgaacgtcctgccatagtcactagcggaaggatgatgtcgtgcttatcttattaggttacctggtagttctcggtacagttttcggcggttacatgatgaccggcgggcaccttggagcactctatcaaccggctgaacttgtcatcatcggcggtgcaggggtaggggcttttatcgttggtaacaacggtaaatcgatcaagggcacgctgaaggcgattccgctgctgtttcgtcgctcgaaatacaccaaaagcatgtatatggatctgctggcgctgctctatcgcctgatggcgaagtcacgtcagcaggggatgttctcgctggagcgggacatcgaaaacccgaaagagagcgaaattttcgccagctacccgcgtattctggccgacgcgatgatgctcgattttatcgtcgattacctgcgcctgatcatcagcggcaacatgaacaccttcgaaattgaagccctgatggacgaagagatcgaaacccacgagagcgaatccgaagtcccggccaacagcctggcgctggtgggcgactcgcttccggcgttcggcatcgtggcggcggtcatgggcgtggtgcatgccctggcctcggcggatcgcccggcggctgagctgggggcgctgattgcccacgcgatggtggggacgttcctcggtattttactggcctacggctttatctccccgctggcgagcgtgctgcgccagaagagcgccgaaaccaccaaaatgatgcagtgtgtgaagattacgctgctctctaacctcaacggttatgccccgccgatcgccgtcgaatttggtcgtaagacgctctactccagcgaacgtccgtcgtttatcgaactggaagagcacgtgcgcgcggtgaaaaaccccaaccaacagacgacaactgaggacgcatgaaaaaccagtcccatccgatcgtcatcgtaaaaaagcgcaagcataaggggcacgggcacggttctcacggctcctggaagatcgcatacgccgactttatgaccgccatgatggccttcttcctggtgatgtggctgatctccatctccagcccgaaggagcttatccagattgcggaatatttcaggacgccgctggcgacggcggtcaccggcgggccgcgcatttcgaacagcgacagcccgatccccggcggcggtgacgattacacccagcagcagggcgaagtgaaaaaacagccgaacatcgacgagctgaaaaaacggatggagcaggcgcgcctgaaaaaactgcgcggtgacctggatcagctgattgaagcggaccctaagctgcgcgcgctgcgtccgcatctgaaaattgacctggtgcaggaagggctgcgtattcagatcatcgacagccagaaccggccgatgttcaaaaccggcagcgccgacgtggagccttacatgcgcgatattctgcgtgcgattgcaccggtgctgaacggtattcctaaccgcattagcctgtccggacacacggatgatttcccgtacgccacgggagagaaaggatacagcaactgggagctttctgccgatcgcgccaacgcctcgcgtcgcgagctggtggcgggtgggcttgatgatggcaaggtcctgcgcgtggtcggcatggctgcaaccatgcgcctgaccgaccgcggaccggatgacgccatcaaccgtcgtatcagtcttttagtgctgaaccagcaggcggagcaggccatcctgcatgaaaacgccgaaagtcagaatgagtcactggacgatttaaaacagcctggggccgtcccttcggctgccgttccaacatcgccaccagccaatccgaggtgatagcgtgagcatggatattaccgatttttaccagacattttttgatgaagccgacgaattgttggccgatatggagcaacatttgctggatctggtgcccgaggcaccggactcagaacagctcaatgccatcttccgtgcggcgcattccattaaaggcggtgccggaacgtttggatttaccattttgcaggaaaccacccatttaatggaaaacctgctggatgaagcacgacgcggtgagatgcagctcaataccgacattatcaacctgtttttggaaacgaaagatattatgcaggaacagctcgacgcctataaaagttcggcagagcctgatgccgccagctttgaatacatctgcaacgcgctgcgtcagttagcgctggaagccaaaggtgaggcgtctgcgcccgctgtccctgcggcaaaactgagcgttgttgacgccgtggccgaacccgatacggcgcctgacgcgcccgcaggaaaactgcgcgtagtgctgtcacgtctgaaggagaacgaggtcaacctgctggaagaggagctggggaacctggcgacgctcagcaacgtggtgaagggcaaagacagcctggccgcgacgctcgacggcgggattggccaggatgacatcgtggcggtgctctgcttcgtgattgaagcggatcagattgcgtttgaaaccgaggcggcggccgttgaagcgcctgctccggcagagaatacccctgcggtagttgccgctgccccggccctgaaagccgtgccaaaagagacggccgctccggcccgcggtgaaaaaccggcggcgcgttccagcgagtccacgagcattcgcgtggcggtggagaaagtggatcagctgatcaacctggtgggtgaactggtcatcacccagtcgatgctggcccagcgctccaacgagctggacccggtgacccatggcgatctcatcaccagcatgggccagttacaacgtaacgcccgcgatttgcaggaatcggtgatgtccatccgcatgatgccgatggaatatgtcttcagccgcttcccgcgcctggtgcgcgacctggccggcaagctcaacaaacagatcgaactcacgctgatgggcagctccaccgagctggacaagagcctgattgaacgcattatcgatccgttaacgcacctggtgcgtaacagcctcgaccacggcatcgagctgccggaaaaccgcgtagcagctggaaaatcgcccgtgggcaacctgatcctgtcagcggaacatcagggcggcaacatctgcatcgaagtgaccgatgatggcgccggcctgaaccgcgagcgcattctggcgaaggcgatttcgcagggaatggcggttaacgaaaacatgaccgacgaagaagtgggcatgttgatttttgccccgggcttctcaaccgcagagcaggtcaccgacgtttccggccgcggcgtgggcatggacgtggtgaaacgtaacattcaggagatgggcggtcacgttgagatccagtctaagcagggcgcgggcaccacgattcgtatcctgttgccgctgacactggccattcttgacggcatgtccgttaaagtggcggacgaagtctttattctgccgctgaacgcggtgatggagtccctccagccgcgtgaagaagatctgcatccgctggcgggcggcgagcgcgtgctcgaagtgcgcggcgagtacctgccgctggtggaactgtggaaagtgtttgaagtggacggggcaaaaaccgaggccacgcagggtatcgttgtgatcctgcaaagcgccggacgccgctacgcgctgctggtcgatcagctgattggtcagcatcaggtggtggttaagaacctggaaagtaactaccgaaaagtgccggggatctctgctgccaccatcctgggtgatggtagcgtcgcgctgatcgtcgatgtatcggcacttcagggattaaatcgtgaacaacgtgtggcgaacacagccgcctgattaagtaaaaggtaataacatgaccggtatgagtaacgtaacgaaactggcgggcgagccatctggacaggaattcctggttttcactttaggtgatgaagagtacggtatcgacatcctgaaagtgcaggaaattcgcggttacgaccaggtaacgcgcattgcgaacacgccagcgtttatcaagggtgtgaccaacctgcgcggtgtgattgtgcctatcgtggacctgcgcgtgaagttcagccagggcgatgtggagtacaacgataacacggtggtgatcgtcctgaatctggggcagcgcgtggtggggatcgtggtggatggcgtgtctgatgtgctgtcgctgaccgccgatcaaatccgtcctgcgccggagtttgcggtcacgctgtcgacggaatacctgacggggctgggtgcgctcggcgagcgtatgcttattctggtgaatattgagaagctgctgaacagcgaagagatggcgctgctggatatcgcggcgaatcacgtggcataaaataaagccgggtggcgctgacgcttacccggcctacgtgttcgagccattcgtatgccgggtaaggcgaagccgccacccggctcttttgtaaccttacgcctcctgctccaccagcgctgattccgcttcccgcgccccttcattctgcgacagcatcgccgtcgcaatcccgttccccagcacgttaatggccgatcgtcccatatccaggaaatggtcaatccccatcagcagcaggatcccggccaccggaatgttaaagctcggaatagttgccgccagcaccaccagcgacgagcgcggtacgcccgcaatccctttcgaggccagcatcaacgttaacatcagcaccgtcacctcagtgaaactcaggtgaatattgtacgcctgagcaataaacatcgaggcgaacgagcagtacaccatagagccgaccaggttaaacgagtagccaatcggcaggacgaaagaggcgatattacgtgaacagccgaagcgcgctaactgctccagcgttttcgggtatgccgcttctgagctgctggtggtaaacgcgaccagcaccggatctttcagcatcgccaccagacggaaaatccttttttcagcaccatgtaacctaccgccagcaataccagacaggtcagaaggatcgccacatagtaaccgccaataaacgaggcatagttcagcaaaatgcccagaccctgagtggcaatcacggacgaaatcgcggcaaaaatggccagcggcgcaacgtacatcacgtagcccgtcactttcagcataatgtgggagaccacatccagcgccgccaccagcggggcgttgaatttttgacctaatgacgcgccgccgatgccgaagaacatcgagaagaccacaatttgcaggatctcattgttcgccatcgcgccggcaatgctggttggaatagtgtgtgacaggaaggctttcagcgacatcccgctaacggccaggccggtatcaaccgtctctgtcggaatgctcaggttcagaccgctgccgggttgttcaagggtaacaataaacagccccaccagaatggaaagtacggatgagctgataaaccacaccatcgctttacccccgacgcgcccaatcgtcgacgtttcacccagcttcataatgcccaccgtcagggtgctgaacaccagcggggcaatcaccatcttaatcagccgcaggaaaatatcggtcagcagggtgatgttctccgaccaggcctgtatcgcgtcgggcgaagcatactcatggattgccgcacctgaaagaatgcccgccagcatgaaaatcacgatgaagagcgtgagtttgtttgcacttgccacaaaaagatcctctatgcgctaaaagagtttcctgcgtcaatgcatacaaaatttttatttaagcgcaggaaaatattcggggcataaattgaagtaaagctgcgtgagttacaacttgtttttaatttttatgaaattcgttgtttttactatgacgatatattgtgacgcggatcacattacaggcgatatatcctcacattaagcaagaataatgcccgttttattttgctaactctttgtaatgtttgttaatagtctgttaattggagggcgggtgactcaccttcgctgaaagtggttgaagcgtgaaccataaactaaattctcagtaaccgcgtcggggaatgtttaagcggggctaacatactgaacagtatgaataaaatagggtaagcggaccattatttcttctggagggtggtaaatgaaaagaacacttctttttatctgcgcgggtacactgctgacggcggcgactgtcggtcaggcgctggcagtcaccagtagcggtactatcggggcgacgctgacgctgacgaacggttgtttgatcaacggctcgccaacgcaaaacggcattaacttcgggacactcgatttcgggacccatcctgcgacattctccaccctgacaacccagttaaccggggccagcggcggaaacacctttaccattcaatgtaccactgccagttacacggtggcgatcaccggcaacaccaacgcgaccgcacccggaaccgttgtcggcacccccggcacacccgcccgctatctggtgaacaccgccaatgcggcacagggcgtggcatacagcctctatagcgacagcgggtacaacaacgtgatcgctaacaacgccgcgttgcccgtagcttccacagcgggcggggtgaacagctataccctctacgggcgcataacgggcggcggcaatagcgtaacggttgtaccgggaacctataccgacacgattaacgtcagcgtcacctactgattcagccatgaaggcattgtgtttatgtctgcgcgaaagcgcagagggcgtcgtgcacccttttttggctctgatcgtcgcgctgatgatgatctgcgacgccggggcggtgacctcccagtccttcagggtgagcgcgacggtagtaccagggtgctcagtgagtaccggcacgggcgggcgctttgggacgctggattttggaacccgcaatggcgtggacaacacgccggtcagcaccagctttgtcgccgacggcgcgttgtccatcgcctgcacgccgggcgtggcgctgagcatgagcattgacggcggccagaattacagctcggtgcgacggatgacgcgttcaggcgggaccgaagttgtcgggtaccggctttacagcagcagctctctggcggcgaacagtgaaattggggttaaccaggccataccaattacctataccaacagcaataacatcgcgctgcctctttttggcgtcgcgctcctgacggggtttagcctgccgggaacatattcagatcaactcaccgtgaccttgtcatggtaggaaagggagaacatcgatgaagccatttttcaggcgatcaggcctggtgggtctgttgggggcaacggctctggcagcgggccaggcgcaggcagcggcaaccattcttttgtggcccatcgatccgtggctttcggcagaggccagagcaactgaattgtggatccagaatcagggcaacagcgccacgacaatgcaggtgcgtattgtgcgctggaagcaggagggcggatatgagcgttacaccgcccagcaggatgtggtcgccagcccgccgatcgtgaccatcgccaaaggcagtaaacagcttattcgcttgatcaagcaggggacgatcccgtcgggggttgagcaggcctaccgcattattgtggatgaaattccccagccggatgccaaagcggaaccgtccatgggcctcaaactgcaaatgcgctattccattcccttatttgtttatgggcaggggatccccaccctcaacgaaggggcgcaccacgcgttggcgaatactcaacagctgagctggcgggtcgttcaggaaggggggaaacccgcgcttcaggtccgtaatcagggggatgtgcacgtccggctcagccaggttgcggttgagcagggcgggcaaaaacgcacggttgccgaggggctgctgggttatgtgctgccaggcagcacccgaagctggccgcttccggctgggatttatcagccgaaccggatgagcgcgcaaattaatgccagggatacgcaatggcaatcgacgcccgtcaactgaaaccggcgatgatgatcctgctttgcgtcagtaccagcgcctttgccgaaaccggcgacgacagtttaccgccgccgccggatgcacggacgataaacggcgaagcagtattccagctcgctctggtgctgaaccactatgacacgggtctggtggtgccggtgacgcagcgtgagggcgcctggtttatttcgggcgcggatttgctccgcgccgggctgccgcccgcgcatgtgccagccggagaggtgaatctctcgacgcttacgtcggtacacgcagagtacgacagtacggcccagcgcctgttgctgacggtcccccgggactgggtcgcggcacggatcacgccgttcagcgaacagagcacgcaaagcaaaccgcactatggccgcggcgcgctgctcaattacgacgtttataccaaccattccgaacacacgggcggtcaggcatcggtctggcacgagttccgctatttcaatgaggattattcattttcatcgacgggttacgcccggcagaatttcaccggtaacagcggacagcaggaagggtacgtgcgttatgactctacgttactgatcaccaacgaagaggatgccaccacctggtccgccggggacgtcatcagcgatgcgctgagctggagcaccagcgtgcgcatgggcgggatcagctacgggcgcgacttctccctgcgtccggatctggtgacctggccgctgcccgcgttttccggcgaggcggccgtcccgacctcggtcgatctctttattaatggctaccgttccggctccacccgccttcagccggggccgtttaccctcaccaatctgccgtatatcaacggtgccggggatgcggtactggttaccacggatgcgctgggacgtcaggtgagtacgacgttgccgttttatgtcagcagcgatctgcttaagcaggggttaagcgacggcgccgtgacgctgggcagcctgcggcgtaactacggtattgagaattttgactatggtccggcggcgggcagcggatcgtaccgctacggggtgaccgactggctgacgctggaggggcatgcggaaggggcggagtcgctggcgcttggcggcgcgggtacggtactgaagctcgggcgttttggcgtggtaaatacctcgtggacccaaagccgcatgcgcggcgatagcggcggccagataaactggggctatcagtacaacaccagcgagtttagcgtagcgacccagcatacccggcgcgaccgtggcttcggcaacctcgccctgtacgatcagcccaccgtttatgatgaaaatgataatcccgttgccagcctgagccgcaataccgaccagtattccttaacctttaacctcggcggatacggcaatatcggtgcggcgtggatcggcgttgagagttttgacagccagaaaactgagctgctcaacctctcctggagccgtaatctgtggggttcaagcagtatttatctggctgccagccgtgaccagcagcggggcgactggacggttgcgctgtcgttgcaggttcccctcggcgaacgtgacagcgccgccgtcacctttgaaaacacccctgacgcaggcagcactcaacgcattaactacaaccattcgatgccttcagatggcggctttagctggaacatggcctgggccaaccagtcgcggtcgagtaactatcagcaggccacgctcggctggcggaataacaacgtggagctacagggcggcggctacggtgagaagggcatgatgacctggtggggcgaggcgatgggctctgtcgtgctgatggacggtgagctgtttgcggcgaacaaaatcaacgatgcgtttgtggtgatcagcaccgacggacatccggatgttcccgtcagctacgaaaaccagccggtcggaaaaaccaataacaaaggctatctgctggtgagcggcgtttccgcctattacccggcaagttaccgcatcgataccctgaacttacccgcggatacccggctgaaagagaccgagcgtcgggtggcgattcgtcggcataacggttatctggtggatttcccgatggagcaggagcgggttgccagcgtgatcctgcacgatgcgcagggcaatgcgatcccggtgggaagccaggtcagacgcgcgtcccgcagcagcgcggttgtcggctacgacggcctcgcctggctggaaaacctcaacgacgtgaatccgctcgaggtcatcaccccggagggtaaacgctgtacggcaacgctgaccgttggcgcaaaccctgaacataagctgcaaacctacggtccgctgacctgtcgggaggcgccgtgagacgcctgttaatcgcgctgctgttgcttttttctggcggcagctgggcggcctgtaccgtcagtacagtgaatgcctcgtttggcagcgtcacctcgttcgcactcagcggtaccggggaagtggaaacgacgggcacgctggtggtgacctgcgataccgttctcaacctgttaactaacgactcggtgacgctgaattacacctcggcatccgtcttcgcgaatagccgggcgaccatgaagcgtacggacaacgcggctattaccgatgtcatccctgcgcggctgtgcggggcgtccggctgcggcggaaacagtgaaatacaaatcagcaaagcctatacctggagcggaaacacgctgctcgggctgctgggttcaaggcgctacaacattcccctttatttccggaccgtaatggggcagaacgtcaccgccgggccgtatcaggtgttgttaacgttcagcattaactacaacgtgtgcgccgttggcgcggtcggagcgtgcctgaccccgcaaaccggcacggcaaccacctcgatcctcctcaacatgaccgtcaccaacgattgcagcaccatgaccacgccggacgtgaattttaacagcgcgccgctggtgcaaaattttcccaccgtttcacagtcggttgtcgtcacctgcaccaaaggcagcacctacaccataggcattaataatggggcaaatgccctgaacaacgtgcgtcgtatggtcagcggcagcaacttcatgagttacgacatctacaaagaggcgaccagcaaccgctggggtagcagcggcagcgagcgctgggccagcgccagctcatcgcaggtcagtacggacgggcttttacgtacctacaactacaccgccaaagttctgaccagccaggccacgccgcctgccggaacctataccgacacgctgattgtcgacgtcgcattctgactcccgcgcttttccctttcgcaaatgtaaagttcctgtggcctgtgccgataacaccgttaataaatctatgagaaggtgttgtatgttgaaccgtatccgcgttgtcacaatgcttatgatggtgctggtcattttcgcacttcttcagcttacttctggcggcctctttttctcgtcgttaaaacagaaccaggacagcttcgcggcctcgaacgatttgcgaatgcagcaaagcgaactgaccacgacctgggatctgatgttgcagacgcgtatcaacctgagccgctcgtctgcccgcatgatgatggacccaaataaccagcagagcagcgcaaaaacggaactgctgaagaatgcgcgcgnnnnnnnnnnnnnnnnnnnnnnnnnnnnnnnnnnnnnnnnnnnnnnnnnnnnnnnnnnnnnnnnnnnnnnnnnnnnnnnnnnnnnnnnnnnnnnnnnnnnnnnnnnnnnnnnnnnnnnnnnnnnnnnnnnnnnnnnnnnnnnnnnnnnnnnnnnnnnnnnnnnnnnnnnnnnnnnnnnnnnnnnnnnnnnnnnnnnnnnnnnnnnnnnnnnnnnnnnnnnnnnnnnnnnnnnnnnnnnnnnnnnnnnnnnnnnnnnnnnnnnnnnnnnngacgccttcaaaaaaatcgcccctcagccggcaatggcgcaggcgagcgcgaacatagatgaaaaatatcaggcctacttcgccggcctcacggagctggtgcagttcctggagaagggcaatatggacgcctatttcgcgcagccgacccagggaatgcagaacgccctcggcgcggcgctcggtgagtacgctaaagccagcggcgagctttatcactccgcgttcacgcaaagccagaacgactaccgtttcgcgaaatggcagatggcggttctcgccctcgcgctggtcatcgtactggtggccgtgtggtacggcattcgtcatatcctgcttaacccgcttggccgcgtcattgcccatatccgtgatattggccggggcgatctcacgaaaacgctgaccgtttctggccgcaatgagatcaccgagctggcaaccagcgtcgaccatatgcagcgttcgctgattgataccgtcgccaacgtgcgcgagggggcggatgccatctataccggcacgagtgaaatcgcgatgggcaacaacgatctctcgtcccgtaccgaacagcaggcatccgctctggaagagacggcggccagcatggagcagctcaccgcgaccgtgaagcagaatgccgacaatgcccgccaggcgtcgcagcttgcagaaagcgcgtccgacaccgcccagcgcggcggtcgggtggtcgacggcgtggtgaaaaccatgcatgacattgccgacagctcgaagaaaattgccgacatcatcagcgtaatcgacggtatcgccttccagaccaacatcctggcgctcaacgcggccgttgaagcggcgcgtgcgggcgagcaggggcgcgggtttgccgtggtcgccggcgaagtgcgtaacctcgccagccgcagcgccaatgcggcgaaagagatcaaagccctgattgaagactctgtttcacgcgtggataccggctcggtgctggtggaaagtgcgggtgaaaccatgaatgacatcgtgaatgccgtgacgcgcgtgacggacatcatgggtgaaatcgcctctgcatcggatgagcagagtcgtggtattgaccaggtcgccctggcggtatcggaaatggatcgtgtgacgcagcaaaacgccgccctggtgcaggagtccgctgccgcggccgctgcgctggaggaccaggcgagccgcctgaaaatggccgtctcggcgttccgtcttacttcaaaaacgacaaatacggtcagctcgcggtcggcgtacagcgaagcaaccccggcacccgtgacaacacgtacgcgcgcagcggtgaccggacaagatgaaaactgggaaacattttgactgacaattaaaccgcggctgcttgccgcttgatgggagcgtggatgttaaatcgtattcgtatctcgaccacactgtttttgattctgatcctgtgtggggttttgcaggttggcagtaacgggttgtctttctgggcgtttcgcgatggctatcagaatttgcaggaagttgagacgagtaatcagcagcgctccgcactggcacaaacgcgtgccgtgctgttgcaggcaagcactgcgctgaacaaagcagggacgttaaccgcgctgagctatccgccggaggatattaaggcgctgatggtcgtggcccgcagcagcctgaagcaggccgacgcgcagtttaaggcctttacggcgcaggaggcggtcagtgagaaagagaaagcgctgaaagtcgccatgaaaaagacctttgatgtgtggtacggcgatctcgaccatcaggcgacgtggctggagaacaaccagctttctgacttcctgaccgcgccggtgcaggcgtctcaggcggcgttcgacggcagctttaacgcctggcagcaggatattaaccagtttgtggcgcgtgccggtgcggacagccgtaccagctaccgcatgtcaggggcgattttcctgaccatggtgatcctggccgccctgctgaccggcggctcgctgtggtggtcgcgcaaaatgatcgtccagccgctggccatcgtcagcagccacttcgacagtatggcgaagggcgatctggcgcgtccggtggccgtgtatggcaggaatgaaatatcagcgattttcgccagcctgaaggcgatgcaggggtcgctgcgggaaacggtaagcaacgttcgccagggcagttacgccatgcataccgggatctccgagattgcggcaggcaataacgatctctcatcccgcaccgaacagcaggcggcatcgctggcgcagacggcggccagcatggagcaactgaccgcgacggtaagccagaacgccgataacgcgcgtcaggcgtccgacttgtcaaaacaggcggcgatgacggcgaaacgtgggggcgatcaggcctctcacgtcgccagcacgatgcaggagattgccgccagctcgcagaaaattggcgacattatcaacgtcatcgacggtatcgcgttccagaccaatattctggcgctgaacgcggccgttgaagcggcgcgtgccggggagcaggggcgcgggttcgcggtggttgccggtgaagtccgaaacctcgccagccgcagcgccaatgcggcgaaagagatcaaagggctgatagaagagtcggtctcccgcgttcagcagggctccgcgctggtggataccgccgcgcagaccatgcacgagattgtcacctccgtgacgcgggttaacgacattatgggcgagattgcctcggcgtctgatgaacaacgccgtggtattgagcaggtggcgcaggccgttacacagatggatcaggttacgcagcagaacgcctcactggtggaagaggcggcggcggctaccgatcagctggcaaaccaggcggatcaccttaccgggttggtcgccgtatttaatgtgaaagagcacgttgaagcagtaacagaagtcggacggtcacaggccgtgcccgttgtatcctgaatgtgattaagaaggcgctatgacatcacccatgccctcagggcaaacgtcattattgttgcagatgacacagcgcctcgcgctgtccgacgcgcattttcgtcggatatgtcagttaatctaccagcgtgcggggatcgtgcttgcggaccataagcgagacatggtctacaaccggctggtgcggcgcttgcgtacgctggggctggatgattttggccgctatctgagcatgctcgaagcgaaccagaacagcgccgaatggcaggcatttatcaactcattaaccaccaacctgaccgcgtttttccgcgaggcgcatcacttcccggtgctggcggaacacgcccgtcgccgtagcggagagtatcgcgtctggagcgcggcggcctctaccggggaagagccgtactcgctggccatcaccctggcggacaccctgggcatggcgccgggccgctggaaagtgtacgccagcgacatcgataccgaagtgctggaaaaagcccgtaacggcgtttatcgccaggatgagcttaaaacgctgtctcctcagcagctacagcgttacttcatgcgcggtaccggcccgcatgaaggactggtgcgcgtacgccaggagctggcgaactgcgtggaatttgctcccgttaatttactggataagcagtacaacgtgccggggccattcgacgccattttttgccgtaacgtgatgatctattttgataaaacgacgcaacaggacatcctgcgtcgctttgttccgttgctcaagcctgacggtttactgtttgccgggcactcggaaaacttcagcaacctcgtgcgtgagtttagcctgcgtgggcaaacggtatatgcgctgagtaaggaaaaagcatgagtaaaatcagggtattgtctgtcgatgattcggcgctgatgcgtcagatcatgaccgaaatcatcaatagccacagcgatatggagatggtggcgacagcgcccgatccgctggtcgcgcgggatttaatcaaaaaatataaccccgacgtgctgacgctggatgttgaaatgccgcgcatggatggcatcgatttcctggaaaaattaatgcgcctgcgcccgatgccggtggtgatggtgtcatctctgaccggtaaaggttcagaaatcaccctgcgcgcgctggagctgggggcggtggattttgtcaccaagccgcagctcggcattcgcgaggggatgctggcgtacagcgagatgatcgccgagaaaatccgtaccgcgtcgcgcgcaaaactcgcggcccacaagccgatggcagctccggcaaccctgaaggcagggccgttactcagctcggaaaagttgctggtcattggggcgtcaaccggaggaacagaggcaattcgccatgtactccagccattgccgctctcaagcccgggtattctgattacgcaacatatgccgccagggtttacccgttcgttcgcggagcgcctgaataagctgtgccagatcagcgtgaaagaggcggaagacggcgagcgcgtgctgccgggtcacgcctatatcgccccgggtgacaagcacatggagctggcgcgcagcggggcgaactatcaaatcaaaattcatgacgggccgccggttaaccggcaccgtccgtcggtggatgtgctgtttcattcggtggcggaacatgcggggcgcaacgccgttggggtgatcctgacggggatgggcaacgacggcgccgccggaatgcttgcgatgcaccaggctggtgcctggacgattgcgcagaatgaagcaagttgtgtggtgttcggcatgccgcgcgaggccatcaatatgggtggcgtaagcgaagtggtcgatcttagccaggtaagccagcagatgctggcgaaaatcagtgccggacaggcaatacgtatttgactcaggagtattattttatggcggataaagagcttaagtttttggttgtggatgacttttccaccatgcgtcgcattgtgcgcaacctgctgaaagagctgggcttcaacaatgttgaagaagcagaagacggggtggatgcgctgaacaaactccaggctggcgggtttggttttgtgatttccgactggaacatgccgaacatggacggtctcgaactgctgaaaaccatccgcgcggatgcaggcatggcctctctgccggtgctgatggtgaccgcagaagcgaagaaagagaacattattgccgctgcacaggcgggcgcaagcggctacgttgtgaagccattcaccgcggcgactctggaagagaagctcgggaagatcttcgagaaactcggcatgtgaggtgatggatatgttgcaacctgctatgaaacccgttgaagaacattcgccgagcgacattattgcccgcattggtagcctgacccgcatgctgcgcgacagcctgcgtgagctggggctggaccaggctatcgccgaagcggcggaagccatccctgacgcgcgcgaccgtctggactacgtcgtgcagatgaccgcgcaggcggccgagcgtgcgctgaacagcgttgaagcctcgcagccgcaccaggatgcgatggagaagggggcgaaaacgctgagcaaacgctgggatgagtggtttgagaaccctattgagctggcggatgctcgcgaactggtaacggatacccgtcagtacctgggtgacgtgccgggccacaccagcttcactaacgcccagctgctggacatcatgatggcgcaggatttccaggacctcaccggccaggtgatcaagcgcatgatggatgtgattcaggagattgaacgtcagctgctgatggtgctgctggagaacattccggaaccggctgcccgtccgaaacgcgagaacgaaagcctgctcaatggtccacagcttgacaccagcaaagcgggcgtggtggcgagccaggatcaggtggacgatctgctggacagtcttggtttctgattgcccgttctgcctcaggtcgttaacgcggcctgaggcagctcagaacaaaaacagcgaaaagagcccgaataaacgggcttttcccgccattggattttctctgcgctggcatgatacccgtgaattaatgggctgcgagcaggcacagtggcagaagagaacgacgacaaaacagaagcccccacaccccaccgacttgaaaaagcccgtgaggatgggcagatcccccgatcccgagagctgacatccctgctgatcctggtggtgggcgtctgcataatctggtggggcggggagatgctcgcccgcagactggcgggaatgctctcggctggcttacgttttgatcacagcatggtcaatgaccccaatctgatcctcattcagatcatcaaccttgtgaaaagcgcgatgctcgccttgctgccgctgatcgcgggcgtggtcatcgtggccctggtttcgccggtcatgctcggtggcctggtgtttagcggtaaatcgctgcaaccgaaattttccaagctcaacccgttacccggtattgcgaaaatgttttccgcgcaaaccggggctgagcttcttaaagcgatcctgaaatcgcttcttatgggcagtaccgccgggttttttctgtggcaccactggccggagatgatgcgcctcatcagcgagtccccgatgacggcgatgaagaatgccctgaacctggtcgggttatgctcgctgctggtggtactcagcattattccgatggtggcgttcgacgttatcttccagatctattcccatatcaaaaagctgcgaatgtcgcgtcaggacatccgcgatgaatataaacagatggaaggcgacccgcacgttaagggccgtatccgccagatgcagcgcgccgccgcgcgtcggcgcatgatggaagatgtgccgaaagccgacgtcatcgtcaccaacccgacccattattccgtggcgcttcagtacgacgaaaacaaaatgagcgcgccgaaagtggtggcgaaaggggcggggctgattgcgctgcgcattcgtgaaatcgcgacggaaaaccgcgtaccgatcctcgaagcaccgccgctggcccgtgcgctgtatcgccacgcggaaattggacaacagatcccgggccagctctacgccgctgtcgcagaggtgctggcctgggtgtggcaactgaaacgctggcgtttagcgggcggtcaacgacctgtaaaacctgagaaccttccggtgcctgaagcactggattttttgaacgagaaggacactgatggctaatctggtggcaatgttgcgcctgcccggcaacctgaaatcgacgcaatggcagatccttgccggaccgattctgatcctgctaattctgtcgatgatggtgctgccgttaccggcatttatcctcgacctgcttttcaccttcaacattgcgttgtccatcatggtgttgctggtggcgatgttcacccagcgcacgctggagttcgccgcgtttccaacgatcctgctgttcaccacgctgctgcgcctggcgctgaacgttgcctccacgcgtatcatcctgatggaagggcacaccggcgcggcggcggcgggcaaggtggtcgaagccttcggtcacttcctggtgggcggcaacttcgccatcggtatcgtggtgttcgtcattctggtgattatcaacttcatggttatcactaaaggggcggggcgtatcgcagaagtgggcgcgcgcttcgtgctcgacgggatgccgggcaagcagatggccatcgacgccgacctgaatgccgggctgatcgcggaagatgaagcgaaaaaacgccgtgccgaagtgacccaggaggcagatttctacggctccatggacggtgcgagtaagtttgtgcgcggtgacgccatcgcgggcattctgatcatggtgattaacgtcgtcggcggcctgctcgtcggcgtgctgcaacacggcatggacatgggccacgcggcggaaagctatacgctgctgaccattggtgacggtctggtggcgcagatcccggcgcttgtgatctccaccgcggcgggcgtgattgtgactcgcgtcagtaccgatcaggacgtgggcgagcagatggtggggcagctcttcagcaacccgcgcgttatgctgctctccgcggcggtgctgggcctgctcggtatggtgccgggcatgccaaacctggtattcctgctgttcaccgctgcgctgctggggcttgcctggtggatgcgtggccgggaaacgcagcctaaggcagagcctgcgccggtcaaaatgcctgagaacacccaggcggtggaagccacctggaacgacgtacagctcgaagattcgctggggatggaagtggggtaccgcctgatcccgatggtggatttccagcaggatggtgagctgcttggccgtatccgcagcattcgtaaaaaattcgcccaggatatgggcttcctgccgccggtggtccacatccgggacaatatggatctcccgcccgcgcgctaccgcatcctgatgaaaggggtggaaatcggcagcggtgatgcgtaccccggacgctggctggcgattaacccgggcaccgccgcaggcacgttgccgggtgagcagacgaccgacccggcctttggtctggcggcaatctggattgagagcgccctgaaagagcaggcccagattcagggttacacggtcgttgaggccagtaccgtggtggcaacgcacctcaaccacctgattggccagttctccgcggaactgtttggacgtcaggaggcgcagcagctgctcgaccgcgtaacgcaggagatgccgaagctgaccgaagatttggtgccgggcgtactgaccttaaccaccctgcacaaagtgctgcaaaatctgctcgatgagaaggtgcccattcgcgatatgcgtaccatccttgagacgctggccgaacatgcgccgctgcaaagcgatccgcacgaactgacggcggtggtgcgcgtggcgcttggacgcgccattacccagcaatggttcccgggaaccggcgaagtgcaggtcattggcctggacacgccgctggaacgtctgctgcttcaggcgttgcagggcggtggcgggctggagccgggtctggcggacagattactggcgcaaacccaggaggcgctggcgcgtcaggagatgctgggcgcgccgccggtgctgctggtgaatcacgcgctgcgtccgttgctgtcgcgcttcctgcgccggagcctgaaccagctggtagtgctgtcgaatatggagctgtccgataaccgcaatattcgcatgacggcgaccataggagggaaataatgcgtaagtggctgtggatcttacttttcccgctggcggcgcaggccgcaggcgagggggcatggcaggccagcagtatcggcttaacgctcaaccatcggggggagtcgatctcctcccgtccgctgtccgcctctgagcccgtgtccgggcagatgacgctggtggcctggaattacaccctgacgggacccacaccggccgggttgcaggtgcggctgtgctcgctgacccgctgcgcggaaatcgagggacaacgtggcactacccaggccttcaacggggtgtctgctcaggagcctttacgctttatctgggaagtgccaggcggtggacgtctcatcccggcgctgaaggttcagcgcaacgaggtgctcgtcaactaccgctaactgcccgccttttcgccagtctccaggcatttctgaaggctggctcgcaaaaatgaccttcccttttgatacaaaagaaacgctgttttataaatcagtgacacgcgtattgacactctttgcgtttttgccattcaccactttgtgatggcagaaacagaaaggtatcaacaggtcgatacttttactgtagccgtgtaaaaactcccggacgaggttgcttacagggagtctcccaaaactgattagggttgacggcaatgaaaacacgtaaaattggactcgcaaattattttgcttacgggtcaggggacttcctcggggcggggactaccgccctgacggccgcctggcttttgtatttttataccaccttctgtggactcacaccgattgaagcaacctttatcttcgctgccgcaagggtgctggatgcggttgtcagcccgttaatgggctttttaaccgataactttggcaccacctggctgggcaagcgttttggccgtcgtaagttcttcatcctgctcggtattccctgcgttttcagctactcgctgatgtgggtaggggacatgagtttctggtactacctgctgacctatctgatctttgatatcgtctacaccatgatcctggtgccgtacgaaacgctggtgccggagatgacggacgatttcaaacagaaaaccaaattctccggggcgcgaatctctatggcgcagatgtccgccattctggcctccttcctgccggggatcctgctcacgcatttcggcaaagacaacgcgatctccttcttctatgcaagcctggtcttctccgtactctgcgcgctgatgcttactttcgtctggttcttcacctgggagcgtccgcgcgaagagtggtctgaagcggctctgcgtgccgaggaagagaagaaaaagctgaccctgggccagagcctgaaccgtctttttgtcgaattaagttcgacgctgcgcatcaagattttccgccagcatctggggatgtaccttggcggctacatcgcccaggacgtctttaatgcggtgttcacctattacgtggtatttgtgctgatacaggaggcgtcaatggcgtccaacctgcttggcacgatggccatcttccagttcctcgccgtgatcggcatgatcccgttgtgcattcgcttcggacctgcgccgtcttaccgcatggtggtcgtgctgtttggtctggcctcgctctcttacgcggtgctttattacgcgggcctgagcgacgtttacgctctgctgctgctgatctctgcggttgccggtcttggccgcgggggtatcaactacgtaccgtggaatacctacacctacattgctgacgtggacgaagtgatcaccggtcagcgtcgcgaagggatcttcgcgggcatcatgacgctgacccgtaaagcgtctcaggccggtgcggtgatgctggtggggatcgtgatgcagatgtcgggctttgtcagcgggcaaaaagtgcagcctgcggaagtgagccacaccattctgatgatcctgagcgttggcactattctggtgctgttctgcggcttccttgtctccctgcgcttcaaactcaatttgcagacccacagcaccctgcgtgaagagaccgcgaaaatgcgcgagtccggccatgcgatgccagaggcggtgaccccgcaggcccgcgctaccgtggagatgctggccggactgccgtatgaatccctgtgggggaacaacaacatcggttatctgaatcgcaataagccggcggccccttcgctgaaggatcgcgcggtactgaattcgacatacaacagaggttaagatgatgaaagtttggcctgtcaaacatagcccgttactgcgtcagcctgagcgctttatcgccagggatgagctgaaatcgctgattcaaaaggtgacgcataacctggtcaatatccacgacaaaacgggtgagtttttgctgcggctggacgacgggcgcgtgatcgacaccaaaggctgggccggatgggaatggacccacggcgtcggtttatacggtatctggcagtattactgccagaccggtgacgaaggcatgcgcgagattatcgacagctggtttgctgaccgtttcgctgaaggcgcaaccaccaaaaacgtgaataccatgtcgccgttcctgacgctggcgtatcgctacgaagagaccaaaaaccctgcctggctgccgtggctggaaagctgggcggaatgggcgatgaatgagatgccgcgcaccgaacatggcggcatgcagcacatcaccctggcggaagagaaccatcagcagatgtgggatgacacgctgatgatgacggtgctgccgctggcgannnnnnnnnnnnnnnnnnnnnnnnnnnnnnnnnnnnnnnnnnnnnnnnnnnnnnnnnnnnnnnnnnnnnnnnnnnnnnnnnnnnnnnnnnnnnnnnnnnnnnnnnnnnnnnnnnnnnnnnnnnnnnnnnnnnnnnnnnnnnnnnnnnnnnnnnnnnnnnnnnnnnnnnnnnnnnnnnnnnnnnnnnnnnnnnnnnnnnnnnnnnnnnnnnnnnnnnnnnnnnnnnnnnnnnnnnnnnnnnnnnnnnnnnnnnnnnnnnnnnnnnnnnnnnnnnnnnnnnnnnnnnnnnnnnnnnnnnnnnnnnnnnnnnnnnnnnnnnnnnnnnnnnnnnnnnnnnnnnnnnnnnnnnnnnnnnnnnnnnnnnnnnnnnnnnnnnnnnnnnnnnnnnnnnnnnnnnnnnnnnnnnnnnnnnnnnnnnnnnnnnnnnnnnnnnnnnnnnnnnnnnnnnnnnnnnnnnnnnnnnnnnnnnnnnnnnnnnnnnnnnnnnnnnnnnnnnnnnnnnnnnnnnnnnnnnnnnnnnnnnnnnnnnnnnnnnnnnnnnnnnnnnnnnnnnnnnnnnnnnnnnnnnnnnnnnnnnnnnnnnnnnnnnnnnnnnnnnnnnnnnnnnnnnnnnnnnnnnnnnnnnnnnnnnnnnntggcgattctgtgtctgacggaattatttggacggaaattatttctgataataaaaaacccggcgctcgccgggtttcttttttacatacgttctacggtttcgatacccagggtatccagaccgagcttcagtgtcttcgccgtcagctgcgccagcttcaggcggctgtgacgcaccgcttcgctctcggcagagaggatagggcagtgttcgtagaagccagagaacagaccggccagatcgtacaggtaagcacacataacatgcggcgtaccgtcacgcgcgaccacggagagcgtctcttcgaactgaagcaggcgggcagccagctgtgcttcacgatcttcggtaagggtcaccgtggcattcgccagcacgctttcgtcgatattggctttacggaagacggagagtacgcgggtataagcgtactgcatatatggcgccgtgttgccttcaaacgccagcatgttgtcccagtcgaagatatagtcggtggtacggttcttggagagatccgcgtatttcaccgcgccgatcccaaccgcgttagccagtttctccagctcgtcagcaggcatatccgggttcttctcggccaccaggcgacgcgcgcgttccagcgcttcatccagcagatcggaaagcttcacggtgccgcccgcacgggttttgaacggcttaccgtctttacccagcatcatgccgaacatgtgatgttccagcggcacggaatccggcacataacccgctttacgcacgatagtccacgcctgcatcaggtgctggtgctgacgggagtcgatgtaatacagcacgcggtccgcatgcagggtttcgtaacggtatttagcacaggcgatgtcggtggtggtgtagagatagccgccatcctttttctggacgatcacacccatcggttcgccttccttgtttttatactcatcaaggaacaccaccgttgcgccttcgctttccaccgccagatttttagctttcaggtccgccacaatgcctggcagcatcgggttatacaggctttcacccatcacgtcgtcacgggtcagggtcacgttcagacggttataggtgagctgattctgggacatggtaatgtccaccagcttgcgccacatctcgaggaagtacgggtcgccgccttgaagtttcaccacgtagctgcgcgcgcgctcggcgaaggcttcatcttcgtcatagtgctttttggcttcacggtagaaaccttccaggtctgccagcgccatttcgcctgcgttttcctgctgctgcttttccagatacgcgatcagcatgccgaactgcgtgccccagtcgcctacgtggttagcgcggatcaccttgtgaccaaggaactcgagggtacgcaccgccgcatcaccgatgatggtggagcgcaggtgaccgacgtgcatctctttcgccacgtttggcgcggagtagtcaaccaccacggtctgcgcatctggctgagccacgcccaggcggtcagacttcagcgccgcgtcaacgtggcttgcgaggaatgcaggctcaaggaaaatgttgataaagcctggaccggcgatttcggttttgctggcgatgccggtgagatccagatgcgtcagtacctgctcagcgagctgtcgcggcggcatgcccagttttttagccactgccatcacgccattagcctgatagtcgccaaactgtactttcgctgactgacgaacctggggttcgcaatccgcaggcgcacctgcggcaatcagtgcctgactgactttttctgagagaagagcctgaatattcacctggataccttacgtttttgatgcgggtaaaaaacacccacgccagtttaagaatttagggcgggagtatactgcaaatgccttcgggcgtcagccctgcggggggcgaagatcgctcagaatccaggcgaagacggtatgcataatcatgcagtcgaaaaaaccgtgattctgcggttggtcgacagagggcaacagagtaaattagcggctttgcgacacgaaacgagactgacctatggcgaactggcataccattgacgaactgcatgatatttcagcagatttaccgcgcttcactcaggcgttcacagaacttgccacccgtctcgggctggatatcgcgccgcttgaggccgatcacatctctttgcgctgccaccagaatgccaccgccgaacgctggcggcgtggctttgagcagtgcggagaactgctgtcggagaatatcattaacggtcgcccgatctgcctgttcaaacttcacgcgccggtaacggtggcgcactggcaattcaccgttgtggaactgccctggccaggagagaagcgttatccgcacgaaggctgggagcatatcgaaattgttctgcctggggagcccgagacgctgaacgcccgtgcgctggcgctgctttccgacgaggggttaagccagccgggtattttcgtcaaaaccagctcgccaaaaggggagcgcgaacgcttaccgaaccctacgcttgccgtaacggacggcaacgtgacggtgaaattccatccctggactatcgagcagatcgtcgccagcgaagcgtaagcattgtgagcgtcgatccagacatcaatcgggcaacgtgccacgatggtacgttgagtgaaatttaaggaggatgacatggcgctgctggaaatttgttgttacagcgtggagtgtgccgtcactgcgcaacggcatggggccgatcgcatcgagctttgcgcggcacctaaagaagggggattaaccccgtcctttggcgtgctgaaatcagcccgccaggccatcatcattccggtgcacccgattattcgcccgcgcggcggtgatttttgttatacggcgggtgagttcagtgccatgcttgaggatatcgccctcgtccgtgattccggttttccggggctggtgatcggtgtgctggacgaagacggcaacatcgatcttccgcgtatgcgtcaggtcatgcgcgccgcccgggggatggcggtcacttttcatcgtgcgttcgatatgtgtcaggatccgatacaagcctttgatacgctggcagaactgggcgtggcgcgcgttctgacgtcgggccagcagtcctcggctgaaaaaggactgaaattaattacggaactaaaagcacattccggtgttccaataatcatggcgggcgcaggagtacgcgccagcaatctggaactgtttttaaacgcaggggtggaagagctgcacagctcggcgggtaaatggataccttcacccatgcgttatcgcaatacagggttgtcaatgtcgacggatgctgaagcggatgagtactcgcgctacggtgtggatggagagtcggttgcggtaatgaaatcgttgattgaacgtcatcacgtgtagcaacgtaccgatttttaccgcgcatcatgtcgcccaatatgatgcttgcttgtaccaggcccctgcaacttcaacaggggcctttttttctccttcatatttcaagccgcagccgcgttggccgcctcgctcaccccggttacttactgatgtaagctcccggggattcgctgcgttgccgccttgctgcaacttgaactattttggagaaaacgtgcgacgcgtaggccgggtaaggcgcagccgccacccggctaaaggctacggcttggtcgcaatcaataccgcacgcatcggggccggatagccttcgatggttttactgtgatcgtccgggtcgaggaattgctccagcgattcggtgatcatccagtcggtgcggcgctgttcctcaaccgacgtcacgcacacatcggcgatacgtacatcgacaaatccacatttctccagccagttcttcagcgccagcgcggaagggatgaagtaaacgttgcgcatctgcgcatagcgatcgcccggcaccagaacggcatgttcatcgccttcgatgaccagcgtttccagcaccagttcgccgccgctgaccagctgatctttcaactgccagagatgctccagcggggaacgacggtggtacagcacgcccatcgagaaaacggtatcaaacgctttcagggcagggagttgctcgatacccagcggcagcaggtgcgcacgctggtcgttacccagcagcttacgcaccgcttcaaactggcacaggaacagctgcatcggatcgataccgacggccagatgcgcgcctgcgccgatcatgcgccacatgtgatagccgctaccgcagcccacgtccagaatggtgcgcccggtcaggtcggataaatgcggcagaacgcgatcccacttccagtcagagcgccactcggtgttgatatttacgccgtacagcgagaacggccctttgcgccacggcatcaggttacgcatcagcgtttcgatgcggttgatctgcccggccgggagcggctcttcgctctccgccgtcacgctgtgcagtaaatccagacgatgaggcgtcagttcaggcagaaactccacggcgttggaccactgcttcaacagaccatgctgctgatcgcgctgccaggtggcaatttgcgcaggcagggtttccagccagtgggaaaggtggtttttggcaatcagctgatagaaattaccgaactcgatcatgctgcgtctccggctttaagcgccaccagagaaccaaagttaaagcactggaaccacagttcgctgtgttcaaatccggctttgcgcaggcgcgctttgtgggtttctacggaatccgtcagcatgacgttttcaagcatgctgcgcttctggctgatctccagctcgctgtagccatttgcacgcttgaaatcatggtgcatgttgaacagcagttcgcccacgctggcgtcttcaaagctgaatttctcagacaacaccagcgcgccgcccgggttcaggccctgataaattttatccagcaaccgctgacgatcgtccggcaccaggaactgaagggtaaagttcagtaccaccatcgaggcgttctggatgtcgatatcgcggatatcgccttctaccacctccacaggcgtaggggctttatacgcgtcaatgtggcgacggcagcgttcgaccatggccggtgagttatcgacagccacaatcttgcagccttcgtgatgaacgttacgacgaatggacagcgttgccgctcccagcgaacagcccaggtcatagacctgcgtgccgggttgaacaaaacgctccgccagcatgccgatcatggagataatattggaataaccgggaacagagcgctggatcatatccgggaagacttcggctacccgttcatcaaaggtccagtcgcccaggctggcgataggcgcggaaaaaagcgtgtcgcgatctgacataacgtaaaaatccgggaaaaataaaggggcatattgtgcgctaatggaaggagaaaaccaactcccacggcatataccaaaggttagccagcaccatcagcaaaagcgagcaccaggtcgcgctcatgccggaacgacgccagcggatcaggcggtggtgaaaaccataataatgcatcaaacgccctgctatcagcagcagcccacagacgtgcaccatccaggtttctgcgccatccatctccattaacagcagtaaaattaacgcgacgggaatgtactcgaccgcgttgccgtggatgcggattgcgctttgtagctcagaaaagcccccgtcaccgtacgagacgcggtactgcattctcaggcgcacaacatcaaatgaaaacttaatcagcagtaatgcacctaacaccgcatacagcgcgctgaccatactaactccctgtttttggcagatggcacgtctctatgatagggggtgatttcagaaaagagaagattgttgtgggatggacggcgcggggccaaccgacggaaccgcctgctgcaaggcctgccagagagcatcgaccagttcaggcgcctgtgcgatatccggcgtatgtaaaaaaaggtacggcgtggtggtgtgctcccatttcgccagcgtttgcagccagacggcgaacatctcctcattttgctgcatgttatcgctgccgataaaccggaccatcgggttctgtgccgttacgatcgcgtggacgggcactttcggttttttgcgctgggcatcaacaacggcttcgctgtgcgggattgcgctatgtacggggcggctgtcgaggatcacgcggttgaccgatcgttcatgcaggccgcgattgagcgctttctccgcgtcgcccttggcaaagaattccggatgccttacttctacgccgtaggtgaagccatgcggcagggcgtcgagaaactgccagagggcaggcaggtcgcgcgggccaaacgtggcgggaagctggagccagtactggccaatacggttggccagaggcgacatccgggtgaaaaactcgtgggttaaatcatcgcagttgcgcagcgcggcgttgtgggagatggtcgccgggaatttaaagcaaaagcggaagtcgtcgctggtttgctcgcgccagcttgacgatctccgcgcggggcagagcgtacagcgtggtattgccctccacgcagttaaagtgtcgggcatactcttcaaggctggtaatacccaggcgcacccatttcgggtgcgaccactggggcaggcccacgtacatcatagcgcgctgaggatctcatccgtgctgcgcacgcgaccgatacgcgggaagatatgggtcatgctgccctggtgctgatccgcagaggctgcgctgcacgcatcttccgcgatcaccaggttaaagcccagctcccaggcgttacgggcggtggattccacaccgatgttggtggagatcccgcacagaataatagtgtcgatcccgcgacggcgcagctggagctccaggtcggtgccgtagaatgcgccccactggcgtttggtgacttctatatcgctgtcgcgtttaccgagcgagacaggatatgtccaccagttgtccggcagcgcctgcgccggggccttggcatcaaccggctgttttaacgcttcggcgaaatcagcggaccagccgacgcgcaccataacaacaggcgagccgctggcgcggcatttttctgccaggcgcgcagcgcggctgaccacatcgtcagcggtgtgcggaccaccggcaaaaggcagaatgccttcctgtaaatcaatgaccacaagggcggttttggtggcatcaagtgtaaacatcgtcactcccgtcaaatgattgcttttctacaccttacgacgtgatggcctgttatcggtcggataattttgttaatttttgtgagaataggcaataagagttcagcaaacgcgcgtcaggccgtgcttcgctcttatcgtgcggcagaatttccagtataatagccgccttttttcatccagttgtgacatacagaaagctgcgacatcgtagcctgcgagacaggcgacaatcagcctgcggctaattaagggatatctcatgcgtacagaatattgcgggcagctgcgtcagtcccacgtcgggcagcaggtcaccctgtgtggttgggtcaatcgtcgtcgcgatcttggtagccttatctttattgatatgcgtgaccgcgaaggtatcgttcaggtgttcttcgatccggatcgcgctgatgcgttgaagctggcttctgagctgcgcaatgagttctgcattcaggtgacgggcaccgtgcgtgcgcgtgacgagaaaaacgtcaacgccgacatggcgaccggcgctatcgaagtgctggcgtccgatctgacgatcatcaaccgcgcggaagcgttgccgctggactccaaccacgtcaacaccgaagaagcgcgtctgaaataccgctacctggatctgcgtcgtccggaaatggctcagcgcctgaaaacccgtgcgaaaatcaccagcctggtgcgccgttttatggatgaccacggtttccttgatatcgaaaccccgatgctgaccaaagccacgccggaaggcgcgcgcgactacctggtgccatcccgcgtccataaaggcaaattctacgcgctgccgcagtcaccacagcttttcaaacagctgctgatgatgtccggcttcgatcgctactatcagatcgtgaaatgcttccgcgacgaagacctgcgcgctgaccgtcagccagaatttacccagatcgatgtggaaacctccttcatgaccgccgagcaggtgcgtgaggtgatggaagccctggtgcgtagcctgtggaacgacgtgaaaggcgttgagctgggcgatttccctgtcatgaccttcgcggaagccgagcgtcgctacggctccgacaaaccagacctgcgtaacccgatggagctggtggacgtggcagacctgnnnnnnnnnnnnnnnnnnnnnnnnnnnnnnnnnnnnnnnnnnnnnnnnnnnnnnnnnnnnnnnnnnnnnnnnnnnnnnnnnnnnnnnnnnnnnnnnnnnnnnnnnnnnnnnnnnnnnnnnnnnnnnnnnnnnnnnnnnnnnnnnnnnnnnnnnnnnnnnnnnnnnnnnnnnnnnnnnnnnnnnnnnnnnnnnnnnnnnnnnnnnnnnnnnnnnnnnnnnnnnnnnnnnnnnnnnnnnnnnnnnnnnnnnnnnnnnnnnnnnnnnnnnnnnnnnnnnnnnnnnnnnnnnngttcgcggtcttgctggcccggctaacgatccgaaaggccgcgtggctgccctgcgcgttccgggcggtgctgccctgagccgtaagcagattgacgactacggcaacttcatcaagatctacggcgcgaaaggtctggcctatattaaagtaaccgagcgtgcaaaaggtctggaaggcatcaccagcccggtggcgaaattcctgaatgcggacatcgtggaagcgatccttgagcgcaccggcgcgcaggacggcgacatgatcttcttcggtgcagacaacaagaaagtggttgcggatgcgatgggcgcgctgcgtctgaagcttggcaaagacctgaacctgaccgacgaaagcaaatgggcgccgctgtgggtaatcgacttcccgatgtttgaagacgacggtgaaggcggcctgaccgcgatgcaccacccgttcacctcgccaaaagagatgacggcggcagagctgaaagcggcgccggaagacgcggtggcaaacgcctacgatatggtcatcaacggctacgaagtgggcggcggttccgtgcgtattcacagcggtgaaatgcagcagaccgtgttcggcattctgggcattaacgagcaggagcagcgcgagaagtttggcttcctgctggacgccctgaagtacggtacccctccgcacgcgggtctggccttcggtcttgaccgtctgaccatgctgctgaccggcaccgacaacatccgtgatgtgatcgccttcccgaaaaccaccgcagcggcgtgtctgatgactgaagcgccaagctttgccaacccggccgcgctggctgagctgggcattgaggtggtgaagaaggaagagaaaaactgatatggcatataagcgtcccgtttcggttctggtggtcatttatgcagaagacacgaagcgggtgctgatgttgcagcggcgcgacgatccggatttctggcagtcggttaccggcagcctggaagagggggagaccgcgccgcaggccgccgcgcgtgaagtaaaggaagaggtcgccattgacgttgctcgcgagcaactgaccctgaaggactgtcagcgcacggtggagtttgaaatttttagccatttacgtcatcgctatgcaccgggaattgagcgcaatacggaatcgtggttctgccttgcgcttccccatgagcgggagatcgtgttcacggaacacctgacctaccgctgggtgaatgcggcggatgccgccgcactgaccaagtcgtggagcaaccggcaggcgattgaagaatttgtaattaacgctgcctgagaaggcgcgatttttggagaactttttatggcaggtcatagtaagtgggccaacaccaaacaccgcaaagcggcacaggatgccaaacgcggtaaaatctttaccaaaatcattcgtgagctggtgacagcggcgcgtctgggcggcggcgatccggcttctaacccacgtctgcgcgcagcggtggataaagccctgtccaataacatgacgcgtgacaccctgaaccgtgccatcgcacgtggcgtgggcggtgatgaagacgcgaacatggaaaccatcatttatgaaggttacggtcctggcggtacggcggtgatggttgagtgtctgtccgacaaccgtaaccgtaccgttgcggaagtgcgtcacgcgttcaccaaaaccggtggtaacctgggcactgacggttctgtagcgtacctgttcagcaaaaaaggcgtcatctccttcgagaaaggcgacgaagatgcgatcatggaagcggcgctggaagccggtgcggaagacgtggtgacctacgacgacggtgctattgatgtttacaccgcatgggaagagatgggtgccgtgcgcgatgcgctggaagcggctggcctgaaggcggataacgctgaagtctccatgatcccgtctaccaaagcggacatggatgcggaaaccgcaccgaaactgctgcgtctgatcgacatgctcgaagactgcgacgacgtgcaggaagtgtatcacaacggtgaaatctctgatgaggttgcagcgactctctgatgagagcctgtaaaccgtttacgggagacgcgtgatgtcgattattctcgggattgaccccggctcacgcgtcaccggctatggcgttatccgtcaggtgggacgccagctaacctacctcggcagcggctgtattcgcaccaaagtggacgatctgccgtcgcgcctgaagctcatctatgcgggcgtgtcggagatcatcacccagttccagccggactatttcgccatcgagcaggtctttatggcgaaaaacgctgactcggcgttaaagctcggtcaggcgcgcggcgtggcgattgttgccgccgtgaaccaggatctgccggtgtttgagtacgcggcccgtcaggttaagcagacggtggtgggcattggtagcgcggagaaaagccaggtgcagcacatggtgcgtaccctgctgaagctccctgcgaacccgcaggccgacgccgcggatgcgctggccattgcgattacccactgtcacgtcagccagaatgcgatgcaaatgagcgagtcgcggctcaatctggcgcgaggcaggttacgataatgacaaatcaggctggatgtttatccagcctttttttattatgtcagcagttaatttcttccagaacgcaggagcgtcacgtgataggcagactcagaggcatcatcattgaaaaacaacccccgttagtactgctggaagtgggtggcgtgggctatgaagtccatatgccgatgacctgcttctacgagctgccggaggcgggcaaagaggcggttgtctttacccagtttgtggtgcgtgaagacgctcagctgctgtacggcttcaataacaaacaggaacgcaccctgttccgcgaattgattaaaaccaacggcgtcgggccgaagctggccctggcgattctgtccggtatgtcagcgccacagtttgtgaacgccgttgagcgtgaagatccggctgcgttaattaaacttccgggcatcgggaagaaaaccgccgagcgtttgattgtcgagatgaaggaccgcttcaaaggtctgcatggcgatctgttcacgccggcagccgatctggtgctgacttccccgggcgcgcctgcatcggatgatgatgccgagcaggaagcggttgccgcgctggtggcgctgggctataaacctcaggaggccagccggatggtgagcaaaattgctaaaccggatgccagcagtgaaactctgattcgtgaagcgctgcgcgctgcattgtgaggtaaaggatgattgaagcagaccgcctggtatcggcaggcactattcagccagatgacgtggtggatcgcgcgatccgtcccaaactgctggatgagtacatcggccagccgcaggttcgttctcagatggagattttcatccaggcggcaaagcnnnnnnnnnnnnnnnnnnnnnnnnnnnnnnnnnnnnnnnnnnnnnnnnnnnnnnnnnnnnnnnnnnnnnnnnnnnnnnnnnnnnnnnnnnnnnnnnnnnnnnnnnnnnnnnnnnnnnnnnnnnnnnnnnnnnnnnnnnnnnnnnnnnnnnnnnnnnnnnnnnnnnnnnnnnnnnnnnnnnnnnnnnnnnnnnnnnnnnnnnnnnnnnnnnnnnnnnnnnnnnnnnnnnnnnnnnnnnnnnnnnnnnnnnnnnnnnnnnnnnnnnnnnnnnnnnnnnnnnnnnnnnnnnnnnnnnnnnnnnnnnnnnnnnnnnnnnnnnnnnnnnnnnnnnnnnnnnnnnnnnnnnnnnnnnnnnnnnnnnnnnnnnnnnnnnnnnnnnnnnnnnnnnnnnnnnnnnnnnnnnnnnnnnnnnnnnnnnnnnnnnnnnnnnnnnnnnnnnnnnnnnnnnnnnnnnnnnnnnnnnnnnnnnnnnnnnnnnnnnnnnnnnnnnnnnnnnnnnnnnnnnnnnnnnnnnnnnnnnnnnnnnnnnnnnnnnnnnnnnnnnnnnnngcgctcgatcacctgctgattttgggccgccggggttaggtaaaaccaccctggcgaatatcgtcgccaatgaaatgggcgttaacctgcgtaccacctccggcccggtactggagaaagcaggggacctggcggcgatgctgaccaacctcgaaccgcatgacgtgctgtttatcgatgagatccaccgtctttcaccggtggtggaggaagtgctctatccggcaatggaggattaccagctggatatcatgatcggtgaaggcccggccgcgcgctcgatcaaaatcgatctgccgccgtttaccctgattggcgccacgacccgcgccggctctctgacctctccgctacgcgaccggtttggtatcgtgcagcgtctggagttttatcaggtgcctgaccttcagcatattgtaggccgcagcgcgcgctacatggggctggatatgagcgaagagggggcgtttgaagtggcgaagcgctcccgcggtacgccgcgtatcgccaaccgcctgctgcgccgggtgcgtgactttgccgaggtgaagcacgacggcaccatatcggccgagatcgccgcccaggcgctggatatgctgaatgtcgatgccgaaggctttgactatatggaccgtaagctgctgctggcggtgctggataagttctttggcgggccggtagggctggataacctggcggcggcaattggcgaagagcgtgagactatcgaggacgtgctggagccgtatctgatccagcagggcttcttgcagcgtaccccgcgtggtcgtatggcaacggtgcgggcgtggaatcatttcggcattacgccgcccgcgatgccgtaagcagcgataaattgtagccccggtaagcgaagcgccaccggggacatgctgactactgcgcggtctttttcatcatactgaaaataaacaacaccgccgcgcacagtaccaccgacggccccgctggcgtgtcataaaacgccgagaaggttaacccgcccgtcaccgcaatcattccgataatcaccgcgataccggccatttgctccggcgtacgcgcaaaacggcgcgcagtggcggcaggaattatcagcagcgacgtgatgatcagcgcgccgacaaacttcatcgccacgccgatggttaacgccgtcaccagcatcaatagcagcttcacgcgctgaagcttcacgccgtcgacaaaggccagatccgggctgacggtcatagccagtaaatttcgccactgccacagcaggatcccgagcaccactgccacgccaatggcaatagaaatcagatcttcgggcgtgacggccagcagatcgccgaacagataggccatcaggtctacgcggatgtttgacatcaggctcactaccaccaggcccagcgacagggcgctgtgcgccataatgccgagcagggtatcaattgccaggtgagggcgtttttccagccagaccagaccggcagccagcagcagcgtgacgacaatcaccgcataaaacgggttcacgtccagtaacaaaccaaacgccacacccagcaatgaagcatgggccagcgtatcgccgaaataggacattctgcgccagacgacaaacgagccgagtggacccgcggcgcaggcaagcataatcccggccagccagccgggcagtaacagttcaatcatgagtgtccatttccccgacgcaggacaattcgtccctgtaaatcatggcggtgattgtgattatgacgatagatgcccagctgttcggcgccgcgatggccaaacatagagataaattccggatgcattgacaccacttccggcgtgccggaacaacaaatgtgatggttcaggcacagcacttcgtcggttttggccatcaccagatgcagatcatgggacaccatcagcaccgcgcagtttagctcccgacggagctggtcaatcagatcgtacagcgcaacctgaccgttgacgtcaacaccctgcgtcggctcgtccaggaccagcagctgagggctgctgagcagggcgcgggcaagtaatacgcgctgggtttcaccgcccgacagcttttgcaagggcgcctcaacaagatgtcccgcctgaacgcgtttcagcgccgggaggatatccgctttacgcgtaccgggacggaggcgcaggaagcggctcaccgtcaggggcagggtggcatcgaggtgtaatttttgcggcacatagccgatacgcaacttgtcttggcggacgataacacctgcatcaggggctaccaggcctaatacgacgcgtaccagcgtcgacttgcctgcaccgttagggccgagcagcgtgagtattttgccgggcttcagattcagcgacacctcagaaaggacgcggcgctggccgaatgagaccgaaacattttcaagagaaactaaagtcgtcatgtcaatttaagcttgcagaagtcatcgaatgttataatatcacattccacgcattcattacgatgattagtcgcattatgttacagaaaaatacgcttcttttcgcagctttatccgctgctctttggggtacaacagcacaagatgttaacgccgccgttgtcgcttcgcttaaaccgcttggatttatcgcctctgccatcgcggatggggtcactgagacccaggttctgctgcctgatggtgcttccgagcatgattattccctgcgtccatctgatgtaaaacgcttacagaacgcggacttagtggtctggattggtcctgagatggaagcgttcatgcagaagtcagccagtcagcttcccgctgagaaacaggtgacgattgccgggctgtccggcgtgaaaccgttactcatgaaaggagctgaggacgagggtgacgaacacgaccacgaccatgctcacggtgaaaaaggtgacgaccatcaccatcacggcgaatacaacatgtatctctggctctccccagagatagcgcggcttacagcggttgcaatccacgacaaattagtggaacttatgccgcaaagtcgaatcaaactcgacgccaacctgaaggattttgaggctcaattagccgcaaccgacaaacaggtgggtaacgagctcgcaccgcttaaaggaaaagggtacttcgtttttcatgatgcctacgggtattacgagaaacattacggtctgaccccgctggggcattttaccgtcaaccctgaaattcagcctggtgcgcagcgtttacatgaaatcagaacacagttggttgagcaaaaagcgacatgcgtttttgctgagccacagttcaggccagcggtcgtagaagccgtggccaggggaacatccgtgcgcatgggaacccttgacccgctaggtacgaacatccagttgagcaaagcgagctattcgcagttcctcagccaactggcgaatcagtatgcgagctgcctgaaaggagattaacgaggaagtgaatacgtgcaacagatagcccgctctgtcgccctggcatttaacaatctgcctcgaccccaccgcgttatgctggggtcgcttacagttctcacattagcggtcgccgtctggcggccctatgtttaccacccgagttccgccccaatcattaaaaccatcgaactggagaagagcgagatccgctctctgctgcctgaggccagcgagcctatcgatcaggccgctcaggaagatgaagcgattccccaggatgagctggatgacaagatccagaatgaagccggcattcatgaatatgttgtttctactggcgatacgctgagcagcgtcctgaaccagtacggtatcgacatgggcaacatcagccagctcgccgcatccgataaagagctgcgtaacctgaaaattggtcagcagctttcctggaccctaacgcccgacggcgatctgcaacgtctgacctgggagatgtcccgtcgcgaaacccgcacctacgatcgcactgcaaacggtttcaaaatgaccagcgaattgcagcagggcgactgggttaacagcgtcatgaaagggaccgtcggcggcagctttgtttccagcgcacgcgatgccggcctgaccagcgctgaaatcagctcggtgatcaaagccatgcagtggcagatggatttccgcaaactgaaaaaaggcgatcagttctctgtcctgatgtcccgcgaaatgctggacggtaagcgcgagcagagccagctggtgggcgttcgtctgcgttcagacggcaaagactactacgctattcgcgcggaagacggtaagttctatgaccgcagcggtacgggtctggcaaaaggcttcctgcgtttcccaacggcgaaacagttccgcgtctcctccaactttaacccgcgtcgtctgaacccggtaactggccgcgtagcgccgcaccgtggcgttgacttcgccatgccgcagggcacgccagtgctggcggtaggggatggtgaagtggtcatggcgaaacgcagcggtgctgctggctactacgttgctattcgtcacggtcgtacgtacaccacccgctacatgcacctgcgtaaactgctggtcaaaccgggccagaaagtgaaacgtggcgatcgcatcgcgttgtccggtaacaccggccggtcgacggggccgcacctgcactacgaagtgtggatcaaccagcaggcagttaacccgctgacggcaaaactgccgcgcaccgaagggctgaccggcaaagatcgcaaagattacctggcgcaggtgaaagaggtgatgccgcagctgcgcttcgactaagctctcctgatttaaaaagccggcgtcagtatgcgccggctttttcttttgtgcgcgggcggcagcctcgctacactatccgaatatatttttgcgtcaccagaccctggaacccgcatggaaaccaaaaaaaacaatattgagtacattcctgagtttgaaaaatcttttcgccacccgcgtaactggggcgcctggcttggcgtatacgcgtttgctggcatggcgttgctacctgcttccctccgcgatccggtgctcggcaaagtggggcgcctggcagggcgcttaggtaaaagcgcacgccgccgcgcgcaaataaatctgttgtactgttttccggataaaagcgacgccgaacgcgaagcaatcattgatgacatgtataccaccgcgccacaggccatggcgatgatggcggaactggcgctgaaagggccggagaagatcgtcgaacgcgttgactggaaagggctggagatcatcgacgagatgcgtcgcaatgatgaaaaggtgattttcctggtgccgcacggctggggggtagacattccggcgatgttaatggcgtcgcagggccagaagatggcggcgatgttccataatcagggaaacaaaatctacgacttcgtctggaataccgtgcgccgtcgctttggcgggcgtttgcacgcccgaaacgatggcattaagcctttcattcagtcggtacgtcagggttactggggctactatctgcccgatcaggaccacggcccggaacacagcgagtttgtcgatttcttcgcaacctataaagccacgctacccgcgattggtcgcctgatgaaagtctgccgcgcccgcgtgatcccactgttcccggtttatgacggtaaaacgcatcgcctgagcattgaggtacgtccgccgatggacgatctgctgaccgcagacgatcacaccatcgcacgtcgcatgaatgaagaggtggaggtgctggtggggccgcataaggagcaatatacgtggatcctgaagctgctcaaaacgcgtaaacctggcgaaacagagccgtacaagcgtaaagagcttttcccgaagaaataggaaaccttcacccctctccccttaggggagaggggattggagcttactctacggtcagtacgcgggtggtattggttgagccgatggtgctcatcacgtcaccctgcgtcacgataacgatatcaccggataccagataacctttgtcgcgcagcaggttcacggcatcgtgcgcggcggccacgccgtcgttggtgctgtcgaagtatactggcgtcacgccgcgatacagcgccgtcaggttcagcgtacgctcgtgacgggacatggcgaagatcggcagaccggagctgatacgggacgtcattagcgcggtacggccagattcggtcatggtgatgatcgccgtgacccctttcaggtggttggctgcgtacatcgcagacatcgcaatcgcttcttccacgttgtcgaactgaatgtccaggcggtgtttagagacgttaatgcttgggatcttctctgcacccaggcacacgcgcgccatggcggccacggtttctgccggatactgacctgccgcggtttccgctgacagcatcaccgcatcggtaccatccagcacggcgttcgccacgtccatgacttccgcacgggttggcattgggttggtgatcatggattccatcatctgggtggcggtgatcaccgcgcggttcagctgacgcgcgcgacggatcagcgctttctggataccgaccagttcagggtcgccaatttccacgcccaggtcaccacgggcaaccatcaccacgtcagacgccaggatcacgtcgtccatcgcgtcctgatcgcagaccgcttcagcgcgttccactttcgcaacgattttcgcatcgcagcctgcatcgcgcgccaggcggcgagcatagttcagatcttcgccgcagcgcgggaaggagacggccaggtaatccacgccgatctgcgctgcggtcacgatatccgctttgtctttatcggtcagcgcttcggcagacaggccaccgccgagtttgttgatgcctttgttgttggagagcgggccgccgacggtcacttcggtgaataccttcataccctgaacttccagcactttcagctgtacgcgtccgtcgtccagcagcaggatgtcgccaggcacaacgtcagcaggcagacctttgtagtcgatacccactttttccttatcgccttcgcctttgctcaggttggcatccagcaggaatttatcgccgatgttgaggaagactttgccttctttaaaggtcgatacgcggatttttggaccttgcaggtcaccgaggatagcaacatggcggcccagtttagctgcgatttcacgcactttgtcggcacgtaatttatggtcttctggcgtaccgtgagagaagttcatgcgcaccacgttggcacccgcggcgataatcttttcgaggttattatcgcggtcggtggccgggcctaaggtggtgacgatcttggttctgcgaagccttctggacatgtaatactccgttgactgaaacaactttggtgttgcgtgaacatagaatcggccttcatctatcgcaaggcagtagcgaggggaccgaatgccgtaaatcgtacatcgtagttattagggaacatcgctctttataagcaattctttatcaaaacgcgattctttcagggcttccttgacccgcttcaagttatccctgaattttgcgccccggcgtaaggtaaaaccggtcgccagcacgtcgatgaccgtcaactgcgccaggcgggagaccatcggcatgtacatgtcggtgtcctccggtacgtccagggtaatggcgagcgtcgcttcccgggccagcggcgtacctgccgtcgtcagggcgatgaccatcgcatcgttgtcacgcgcgagctgcgccagctccacctggctcttggtgcggcccgtatgggagatgagtaccacgacatcatcttcactacaattcatacagctcatgcgttgcagcacaatgtcatcggagtaaatcaccggcacgttaaagcgaaagaacttattcatggcgtcatgcgccacggcggcggacgagccaaggccaaagaaggcaatccgtttggcctgcgtgagaagatcgaccgcgcgattcactgaactcatgtccagagactggcgaacgtggtcgagcgtggccatagccgattcaaatatttttgcggtgtaagcatcaacgctgtcgtcttcatctacattgcgattaacatacggggtgccgtttgccagactttgggccagatgcagtttaaaatcaggaaagccgcgcgtgtccagactacgacagaatcgattgaccgtcggttcgctgacgcccgattcctgtgccagagcggcgatgcttgaatgaatcgcctgagcgggcgcggcgagaataacttcagccactttgcgctcggatttgctaaggtgttccagttgaaactggattttttccagcatgttcattgttaacaagacgctcatgagggcataaacgatttcataaagagatgaaatcttgattcgatttagccgatattacccccgggactcccgaaagggtaatcgtcgacaagaaatgttgttgttttttttcattacttgatcgacgtcgggttttgctctgaccctgttgcgcaaagaatcgacgtttgttgcgtcatcagacgggcgtaatggcccgggcgacgaaaaatcaccgtatcgcacgcgacgttaagcgctaatggtttcaggaaacgcgtaaaagcagtacagtgcattgtaataaaattacaacgatacctggcagagtaccaggcgatctaactgaggagaatgacatggcggtaacgcaaacagcccaggcatgtgacctggtcattttcggcgcgaaaggcgatcttgcacgccgaaaattgctgccttccctgtatcagctcgaaaaagcgggccagatccatcccgacacccggatccttggggtaggacgcgcagactgggataaggaggcttataccaaagtcgtgcgcgaggcgctcgaaacgttcatgaaagagaaaatcgatgaaagcctttgggataagctgagcgggcgtctcgatttctgcaacctggacgtcaacgatgtaggcgcctttacccgtctgggtgaaatgcttgaccaggaaaatcgtgtcactattaactatttcgccatgccgccaagcaccttcggcgccatctgcaaaggtctgggcgaagcgaagctgaacgccaaaccggcgcgcgtggtgatggagaaaccgctgggtacgtcgctggcgacctcgcgtgaaatcaacgaccaggtgggcgagttctttgaggagtgtcaggtttaccgtattgaccactatctgggcaaagagacggtattgaacctgctggcgctgcgttttgccaactccctgtttgtgaacaactgggacaaccgcactatcgaccacgtggaaattaccgtggcggaagaggtgggcatcgaaggccgttggggctacttcgaccaggccggccagatgcgggacatgatccagaaccatctgctgcaaattctgtgcatgattgccatgtctccaccgtcagatctgacggccgacagcattcgtgacgcaaaagtgaaagtgctgaaatcactgcgccgtattgaccgctccaacgtgcgcgagaaaaccgtgcgcggccagtacaccgcaggttttgcccaggggaaaaaagttcctggctatctggaagaagagggcgcgaacaagtccagcaacaccgagacgtttgtggcgatccgcgtggatatcgacgactggcgctgggccggtgtgccgttctacctgcgtaccggtaaacgtctgccggcaaaatgctccgaagtggtggtctacttcaaaaatccggaactgaacctgttcaaagaatcctggcaggaactgccgcagaacaaactgaccatccgtctgcaaccggacgagggtgtggatattcagatcctcaacaaagtgccgggccttgatcacaaacacaacctgcaaaccaccaagctggacctgagctactctgaaaccttcaaccagacgcatctcgccgatgcttacgagcgtctgctgctggaaaccatgcgtggtatccaggcgctgttcgtccgccgcgatgaagtggaagaggcgtggaagtgggtcgactccatcactgaagcgtgggcagccgatcaggatgcgccaaaaccgtatcaggcgggaacctggggacctgtcgcctccgttgcgatgatcacccgtgatggccgctcctggaacgagtttgaataaccaccttctctagcccaaaggtgttattttaccggtaacatgatctaacacagcaagtggcataatttttatcttttaagctccgcgtggattcacccgcggagctttttttattacactcccttcagacattttgcccctgtgctccggatatcaggcgtttcagcgttgttaacaaccgtcagaaactgttcaaactcccgagcctggacagataaattagaggagcttttatgaatccgacattgttacgcgtaacacaacgcatcgttgaacgctcgaaagagacccgtgctgcctaccttgcccgcatcgaacaggcgaagagtgaaactgtccatcgctctcagctggcctgcgggaatctggcccacggctttgcggcctgccagcctggtgataaagacgcgctgaaaagcatgttgcgtaacaatatcgccatcattacctcctataacgacatgctttcagcccaccagccgtatgaggtctacccgtctatcatccgcaatgcgctgcacagcgtgaacgcggtgggccaggttgcaggcggcgtgccggccatgtgtgatggcgtaacccagggccaggacggtatggagctgtccttgctgagccgcgaagtgatcgccatgtcggcggcagtgggcctctctcacaacatgtttgatggcgcgctctatctgggcgtgtgcgacaaaatcgtcccggggctggtgatggccgcgctgtcgtttggccatctgccagcgatttttgtgccgtcaggcccgatggctagcggtctgccaaacaaggaaaaagtccgtatccgccagctgtatgccgaaggaaaagcggaccgtcaggcactgctggaagcggaagccgcgtcctatcatgcgccgggcacctgtacgttctacggtacggccaacaccaaccagatggtggtggagtttatgggtatgcagctgccgggctcgtcgttcatccagccggatgcgccactgcgtaaagcgctgaccgaagccgcagcccgtcaggtgacgcgcctgaccggtaacggcaacgagtggatgccaatgggcaaaatggtggatgaaaaagtcatcgtaaacgggattgtcgccctgctggcgaccggcggttcaaccaaccataccatgcaccttgtcgcgatggcgcgcgcggcgggcattctgatcaactgggatgacttctccgatatctcctccgtggtaccgctgatggcccgtctgtacccgaacggtccggcggacatcaaccacttccaggccgcgggcggcgtgccggtgctgatgcgcgagctgcttaaaggcggcctgctgcatgaggatgtcaacacggtggcgggctttggcctgcatcgctatacccttgaaccctggctgaacaacggtgagctggactggcgcgaaggggcgagcgactcgctcgatcctcaggttatcgcaaccttcgaacagccgttctctcctcacggcggcaccaaagtgctgagcggtaaccttggacgtgccgtgatgaaaacctctgccgtgccggaagagaatcaggttattgaagccccggcggtggtgtttgaaagccagcacgacgttttacctgcctttgacgcgggtctgcttgataaagactgtgtggtcgtggtgcgtcatcagggaccaaaagcgaacgggatgccagaattacataaacttatgccgccgcttggtgtattattggaccgccgtttcaaaatcgcactggtaaccgatggacgcctttcaggggcatccggtaaagtgccttcagcgattcatgtcaccccggaagcctacgacggcggcctgctggcgaaagtgcgtgatggtgacatgatccgcgttaacggtcagacaggcgagttaaccctgctggtggatgaagcagagctggcggcgcgtcagccacatattcctgacctgagcgcgtcacgcgtgggtaccggacgcgaaatgtttggtgcgttgcgtgagaaactctccggtgcggagcagggcgcaacctgtattacgttttaagacgacttgattttaacgatctggcgagagaaaactctgatgaaaaactggaaaacaagtgcagaagcaatcctgaccactggccctgtcgtgccggttattgtggtaaacaaactggagcacgctgtcccaatggcgaaggcactggttgcgggtggcgttcgcgttctggaagtgaccctgcgtaccgcctgtgcgatggatgcgatccgtgctatcgccaaagaagtgccggaagcgatcattggtgccggtacggttctgaatgcgcagcagctggcggaagtgaccgaagcgggcgcacagtttgccatcagcccggggctgactgagcccctgctgaaagccgcaaccgaaggttctattccgctgatcccgggtatcagcaccgtttctgaactgatgctgggcatggactacggcctgaaagagttcaaattcttcccggctgaagcgaacggcggcaccaaagcgttgcaggccattgcgggcccattctcccaggtgcgtttctgcccaacgggcggcatctctccggccaactaccgtgactatctggcgctgaaaagcgtgctgtgcatcggcggctcctggctggttccggcggatgcgctggaagcaggcgactgggatcgcatcactaaactggctcgcgaagcggtagaaggcgcgaaacagtaagtttgtttgccgggtggcggctgcgcctaacccggccagccagacagttaaaacgggcctttcggcccgtttttttatcctgctacgctgacgttcgcagccgctctttttgctctcgcgacggcttcgtccacattttccccggtcgctaatgccacgcccagacgacggcttccgtcgatctctggtttgccgaacagccggacctgcaagcctgcgccaaccgcaccttcgacgttatcaaaggtgacattctggctggtcagctgcggcaggatcaccgccgaggctgccgggccgtactgacggatgccgccaaccggcaggccgaggaaagcgcgtacatgcagcgcgaactcggagagatcctgtgaaatcagcgtaaccatcccggtatcgtgcggacgaggggagacttcgctgaagatcacctcgtcgccgcaaacaaacaactccacgccgaacaggccgtagccgcccagcgccagcaccgtcttgcgggcgatctcctgtgcgcgtgccagcgccagcgcgctcatctgctgcggctgccaggattcgcgataatcgccgtcttcctgccgatgaccaatcgggtcgcagaaataaacgccatccacggcgctgacggtgagcagggtaatttcaaaatcaaacttcaccacgccttccacgatgacgcgcccggccccggcacggccgccctgctgggcatagtcccaggcgttgtccagcgtgctgctgtcgcggataaagctctgccctttgccggaggagctcattaccggcttaatgatgcacgggtagccaatctcctctacggcctggagaaacgcagctttatccccggcaaaacggtagctggaggtcgggagctgtaattcttctgccgccaggcgacgaatgccttcccggttcatggtcagttttgccgcagtggcgcagggcaccacgcgctggccttcctgttcaagggcaatcaacatctcagtggcaatggcctcaatttcaggtaccacgaaatccggtttttcgtcggcaattaacccccgcagcgcattaccgtcaagcatatcgatgacgtgcgagcgatgcgcgacgtgcatggcgggcgcattcgcgtaacggtccaccgcaatcacttccacacctaaacgctggcattcaatggccacttctttacccagttcacccgatcccaacagcatgacgcgcgtcgcggcgggacgcagcgcggttcctaaacgagtcataaaaatccccctgaaaaagatgcgggcagtataaacgaaaacgtttgcgtctgtcttgtatggggataaccggacagcagggaaatttgcgcttctttagtactgacagacatttcctgacacccgctcgcttaggctgtgaaggttacgcactgttacgtgaggaaaaatatgtcaggctggatgaatcaactgcaatccctgttgggacaaaaaggctcgtcgtcgggcgagcagggtctgagcaagctgctggtgccgggtgcgctcggcgggctggccggtttgctggttgccaataaatcatcgcggaaactgcttaccaaatacggtaccggcgcgctgctggcgggcggaggggctattgcaggctccgtcttatggaacaaatacaaagacaaggtgcgcagcgcgcatcaggatgaaccgcagtacgggaagcaggtatcgccgttagatttacgcaccgagcggttgatcctcgccctggtctttgcggccaagagcgacgggcatattgatgccagtgaacgtgccgcaattgaacagcagatgcgggaagcgggcgttgaggagcagggcagggcgctggtggcgcaggccatcgaacagcccctcgatccgcagcgtctggcgcaaagcgtgaaaaacgaagaagaggcgctggaactctattttctgagctgtgccgccatcgatatcgatcactttatggagcgcagctacctgaacgccctgggcgatgcgctgaagatcccacaggacgttcgtgagggaattgagcaggatattcagcagcagaagcagaccctcgtgggctagaaggccatgtttcgcttgcatcatacgcgtgttttgccaaccttataggatgtaaaacgaaaaagtaagaatgccatgcctccaaaagcccgacgtactccttatgcgatcaccacgcatggcgatacgcgtatcgataactactactggctgcgggacgattctcgttcccggccagaggtgctggactatctgcacgaggaaaacgactatggccgccaggtcatggccagccagcaggcgcttcaggatcaacttctgaaggaaatggtgcagcgtatcccccagcgtgatgtctctgccccgtggtgcaaaaacggttatcgctatcgccatatttatgagccgggaaacgaatatcccatctaccagcgccagtctgtgctgagcgccgagtgggatgaatgggagatcttgctggatgcaaacaaacgtgctgcccacagtgagttttatacgctgggcggcatgtccatttcccccgataacgccattatggcgctggctgaggattacctctcccgccgccagtacggtttgcgtttccgcaatcttgaaacgggaaactggtatcccgaaatgctggataatgtctcccccgatttcgtctggggtaacgattcagaaacggtctactacgttaaaaagcatgtctcaacgctgctgccttatcaggtctggcgtcatacggtggggaccgattccgccgacgatgaactggtgtatgaggaaaaagatgagacgttctatgtcagcctgcacaaaacgtcgtctcgccactacgtgatcattttcctctccagcgccaccacctcagaagtgctgctgctggatgcagagctgccggatgcgcagccgctgtgcttcctgccgcgccgtaaagatcatgagtacagcctggatcacttccagcacagcttttacctgcgttcgaaccgcgagggcaaaactttggccttataaaccaagtgcgnnnnnnnnnnnnnnnnnnnnnnnnnnnnnnnnnnnnnnnnnnnnnnnnnnnnnnnnnnnnnnnnnnnnnnnnnnnnnnnnnnnnnnnnnnnnnnnnnnnnnnnnnnnnnnnnnnnnnnnnnnnnnnnnnnnnnnnnnnnnnnnnnnnnnnnnnnnnnnnnnnnnnnnnnnnnnnnnnnnnnnnnnnnnnnnnnnnnnnnnnnnnnnnnnnnnnnnnnnnnnnnnnnnnnnnnnnnnnnnnnnnnnnnnnnnnnnnnnnnnnnnnnnnnnnnnnnnnnnnnnnnnnnnnnnnnnnnnnnnnnnnnnnnnnnnnnnnnnnnnnnnnnnnnnnnnnnnnnnnnnnnnnnnnnnnnnnnnnnnnnnnnnnnnnnnnnnnnnnnnnnnnnnnnnnnnnnnnnnnnnnnnnnnnnnnnnnnnnnnnnnnnnnnnnnnnnnnnnnnnnnnnnnnnnnnnnnnnnnnnnnnnnnnnnnnnnnnnnnnnnnnnnnnnnnnnnnnnnnnnnnnnnnnnnnnnnnnnnnnnnnnnnnnnnnnnnnnnnnnnnnnnnnnnnnnnnnnnnnnnnnnnnnnnnnnnnnnnnnnnnnnnnnnnnnnnnnnnnnnnnnnnnnnnnnnnnnnnnnnnnnnnnnnnnnnnnnnnnnnnnnnnnnnnnnnnnnnnnnnnnnnnnnnnnnnnnnnnnnnnnnnnnnnnnnnnnnnnnnnnnnnnnnnnnnnnnnnnnnnnnnnnnnnnnnnnnnnnnnnnnnnnnnnnnnnnnnnnnnnnnnnnnnnnnnnnnnnnnnnnnnnnnnnnnnnnnnnnnnnnnnagtttgaggagtgggggaacccgcaggatgaaacctattatcgctacatgaaagagtacagcccgtacgataacgtcgaggcgaaagcctatccgcatatgctggtgaccaccggcctgcacgattcccaggtacagtactgggagcccgcgaaatgggtggcgaagttgcgtgagctgaaaactgacgataatttgctgctgctgtgtaccgatatggactcggggcacggagggaaatcagggcgatttaaatcctatgagggggtggcgctggagtacgcctttttgattggcctggcgcaggatacgctgccaggccgggcggggactcaggcttcgcctaaataatgcttcagcgtcaggcgcagttccgggctcattctgtcgaggttgttgtacagccagcgcagatagcccggatctttgtccgccacttccgatactggcttcccgcgatattttccgaacgtaaaggtggtcagtagcgcggggcgcccggtaatggtcgccatatcgtctggcgtccagccggaagtattcatgatatcaatcaggagcgctgcggtgatgtagcagtcgtaaagagcgcggtgatgatgcagcccttccggcgtccgtacgctgagtttgcgcgacttatacagcgccatattgctgtatttgatccccggccacagacggcgcgccagcttcatagtgcaaatccattcgccgggcatctccggcagcacgcggcggtcaaagctggcgttatgggccacataccactggctaccgtggtaaagagggatgatctcttcaatccacggcttatccgccaccatcgattccgtaatgcgatgtatcgccatcgcctgcgcactgatgggacgatccgggcgcaccagatggctcattgggttgactatctttccatcaatcacgtcgacagaagcgacttccacaattccaccctgcaaatcacaggtttcggtatcgataacgcgcagcattgatcgctcctgatccaaaaatgcctagcctaatggaatgatatcgccttgccaaccctgttggcctaaagaaccggttagcagcagttctcccttatcggcacgtacgatcagctgacctttttcatcccataacgcgctaccgccgcgcgcgttcgccattaataccgcgatggcgtacttgtgcgcgaagcgttgtaacgaaccgatggattgccgccagcgatgctcgcccacggccaggctgctggtgaacagcgttgcctccgggtccagttccggggcgtcagcctggttatccacgatggttaaccgtttatcgccaggaataacacccgcaccgttgccctgcggataacgccgaatggtcgacaggttaggggtgaaaagcgcgagtcctttctggggctggccgtgttgctggagcgtaataccagcaatcaccgtgatgaaacgtgactgggcggcgtgaaggaggggggcaagctgcaaatcgtcagggggtgggggtaaggatgttccgcctggaccggtaagcgaaagctccggaaagacgatcaaatcgcacccatgccaggcagcctcggcaataaagtgcaggtgatgttttacgtgctcatcaacacagttgtgccgcggggcatactgagccgcggcaatattccatcgtgacatcgtgacttccttatacactaagtcgctgggattttaagattacacctaaatttatcagggttttcttatcctgccacataacgcgtaaggaagtgtaacgagacgttaagcttatttaactttaggttcgtacggcaggcgcgagagattgacggaggcgaggcgatgcgcaatgagacgttcgcgaaaccagtcgcgcagatgcgcgggttgttcacgctctaccacttcagccacgacgggcatgttgtaacgctctttgaatgcgacccccgcggcggcgagatcgacattcactttgtccatctcgtcctgaggaagggcggccagattaacgttcatttccttctcctttttctgcggcggcaacgttaccgcgattgttcaacgatgacaagggagcaaaggatgttcctcgactcgttaattatacagagttattctttagcattcaggcataacgaaaaggaatgattgtgatgcattttaccccttcccgtgtcgcgtgcgcgctggtctttctgctctcttcagccatcacgccctcagttctggcccatgcgcatcttaagcagcaatccccgcaggaaaataccgttgcggtggcaccagaggtcattaccctgaacttctcggaaggcattgagcctgccttcagcggcgtggtggtgacggacgcgcagcagcacaagatccagaccggcgcggtgaagcgtgacgagaaggataacgcaaagctgattgttcctcttgagaaaccgttgacgaccggcacctacacggtggactggcatgtggtctccgtggatggccacaaaaccaagggcagctatcattttagcgtgaaatagcatgctggccctgagctacgccgcgttacgctttatccattttgctgcgctgatgctgcttttcggcaacgcgctttacagcgtctggtttgcgccgtcttcgttgcagcgtctcatgacccggcgtttccagcggcagcagaaactcgcggccttaatcagcctgatggcggctctgctgatgttcggcctgcaaagtgggttgatgggcaacggctggggcgatgtcattcgcccggcggtctggcgcagcgtgctgggaacgcaatttggcggcgtctggttatggcagatgatactggccgcggtgacggcgggcgctgcctggcttaccccgcaaaaaggctcacggctgttactgctcgcgatggggcagctggtgttgctggcgggcgtgggacatgccgcgatgaacggtggcgcaccgggagcgttgcatcgtctcaaccatgcgcttcacctgctctgcgccgcgacctgggtgggtggtttactgccgctgctgttttgcatgcgtctggcgaaaggccgctggcagccagccgctatctttaccatgatgcgcttctcccgcgtggggcattacgccgtggcgggcgtgctgctgacggggataatcaatacgctctttattgttggcataaacgtgccgtggcaggcgccttatgtccagctgttgttgttcaaatgtgcgctggtcatgatgatggtggcaattgcgctggcgaatcggtattttcttgtgccacgctttcgcccggaagccgggcgggaacaacagatttttatcaggatgacacaggcagaggtggtgctgggcgcgctggtactggcggccgtcagcctgttcgcgacctgggaacccttctgacaaggttaaataacatatgaaaaagacactgctttctcttttacttctcacctgtgccagcagtgcgttagccgcgccgcaggtcatcaccgtcagccggtttgaagtgggcaaggacaactgggcatttaatcgtgaagaggtcatgctcacctgccgtcccggtaacgcgctgtatgtcatcaatcccagtacgctcgtgcagtatccgttaaatgacgtagcggagcagcaggtggccagcgggaaaagtaacggacagcctgtcagcgtgatccaggtagatgacccggcaaaccccgggcagaagaagagtctggcaccgtttattgagcgcgctgaaaagctctgctagccgtcaggtttccagtaaaaaaaaccgcaggtgcttgtaaaagctctgcggtttttcacatttagtgatgttctgacgctttttttcagaccacttttgctgtggactggaaaacctgacgtcgtcatctattcttaaagggcaaggcgattgagcctgcattaatgccaacttttagcgcacggctctctcccaagagccatttccctggaccgaatacaggaatcgtattcggtctctttttatctgcatgaaaataaaaggtaaaatccggttttcgtctcagcagaaggttcacttcctgtgcgcctgcttcaaacataccacaacccggcaggcgtaagtccagtcctttttggctgttttgttaaatttttgtttgttttttgcctgagacgactgcgggatcaatgcgcgcctgtacgcaagccgcaatatcatcaagtaacgcaaagcggcgacggtattcggcgcgttttttgctggcaatctcctccagcgctttacgctccatctggagcggcaactgccagcagaagggggagagtttctttccgttcaggccttcccagaactcgtcgtagctggcgttaaaatgacggcctttgctcagacggtagcgcagcgcgcggaaaacatggccttcatcgctgacggcaaaaatcgcgctgatgttcgagcgtgaggccagctggaagatcacctccatcagcacgcgtttcgggaaaagcccatggcaggcacgggtagcctgcttaatcacctcccgtgaaacatgacgacgtggaccctgaaggccgccgatcaccagcaccatacggccgttactgcgtgcgacacagaacgtcaggctggcaagcagcgtattgtcgttgtcgtgcagccaaagcgtgctttcgccttcgcgttcggccttacctgcggacgaggcgtggacggtatagatttcgccgttttttgcctcgaaccggacaaccggcacctcttgcgggctggtcagcgcgtgggcgagggcgatgtttttcagactatcaatccactgatagtggctgacgatagcatcggcccgatcgtttgagttcaggccgcgcatcagatactggcggtgagttttgctcggcaaggtaatttgagaggtgagcagcctgtcgaaatcatcgcgcccggacagggcctccagcatgcgatgggtggaggaccagaataaaagcgagcgtagaaggaactttaaccggtaatcacgtttgtgccagattgggccgggaacgcgttttcctctcaccagttcagaaataatatttgtgcgatgcggataaaaaacatcgttttgcaggtgtatgtttgacacgtgaaaatccctctttttattccgctctattttaaaggccagggaataagggattaatagcgcagcgatctttatttccggctggtttatggtttgtttggattcgcaaaatccaacgccagctcatgacattttctgtggcagctatacttcttacaggaggcgttatgtatcagaaaatagagggagaacactggcgtcatgtctgggttgtcagcgatattcatggttgctatcagtggcttatggatgagctgaaacgacggcattttaatcctgatacggatctgctgatctcggtgggggatattatcgatcgcgggcctgacagtgtaaaatgtttacagctgatgcaggaaaactggttttatgcggtacgcggtaatcacgagcaaatggcgttagatgcgcttgaaaataatgattttagtctctggtcgataaatggcggtaactggtttaccgggcttaaggacgctcaacaaaaacaggcgaagggtttactcgatgcgtgtcgggacttaccgcacattattgaaataacctgcaaaaacggtctgaacgtgattgctcatgcggattatccctccgccgaatatggctggcataagccggtggatgcccagcgcgtgctgtgggatcgcgaccggctaatgggctttatggtgggcaaagggcagggcattagcggtgcggatcacttctggtttggacatacgcctgtggacaaacgctacgattttaacaatctgcactacattgatacgggggcagtattcgggggctttctgacgctggcgcagcttcagtaataaataacccgccttcgggcgggttctctttgggtcaggcaagacgcaagacccaggcatcggttttactgtcgtaatgctcacggtacagaacggaatgttccccatcaaggatcgccgggacgctggtatctgcatcccaggcgtccagctgcatgcacaaatccggatcggatttgcagggaatacttaacgttcgttcgccttgtgattcgccgcgcaattcagcgtcgtcgatttcaaaagcgccaatgcgtacgctggttttcgtcataatgctctccggtttgttgcccaaaatctggtatgaccagtgcagtcacccatttttgatcctagacaaggagagcgaaatcgccagtaaaaaaatgcgcttttttttaggcgctgcggttgttaccggtaaacaggcggccatcgcgtaccagttcgcgcggatagctgtttttcagccgcgagccgacttttttcgccagccccagcggatagccctgatacgtcacgatgacttcatcctgtgacgggccgtcttccgggtaaacgtcacgaccgcgataccactcttccgcttcctgatgcgtcagggcaaaggtgttctcactgccggccagcgcaatgaccgcttcgtgctgccagcgatagcctttgttgtggatctccgccaggcgaataccgaggcgggagaaacgcaccttaccaatcagcggttcgatgttgaccgggaacagccacagctctttgtcacgcatccagaggcgcaggctctcatcccagtgcaggccgactttgctcgcagccgcttgcgcctgtgccgcctcacggcctttgaccggcgtgaacgggaagttgccgaccttaaacttaggggcaggcaagggatcgacggcgcgggttttacgcagacgggcaacaaagaagccttcgcaatcgtaaatctgtgggaagacatgcaggaagccttcaggcgtggccgcatgactggccgagtcgaagagggtgtccagcggcagaaactcgacggcatccgcatagcgttgcttgagccacaggcagacgtcctcgttttcatcgcgattcagcgtgcaggtggaataaaccagcgtcccgcctgggcgcagggcatgaaacgcgctgtcgatcagttcgcgctgtgtggcggcgatctccaggttgctttcaacggaccagttttttaacgcatcaggatctttacgcaccacgccttcgccggagcagggcgcgtcgagcaggatggcatcaaaggcttccggcagggcagcgccaaacacgcgaccatcgaagtgcgttaacgcgacgttgtggatcccgcagcggctgatattggcgtgcaggactttaacgcggctggcggaaaattcgttggcgaggatcgcgccgcggttattcatccgggcggcaatctgcgtggttttagagcccggcgccgccgcgacatccataacccgctcaggctggttcccgtcggcaaacagcgcagcaaccggcagcatggagctggcttcctgaatataaaacagcccgctcaggtgctcggcggtgctgccgagcggcaggctctcctcgtcatcccgttcgatccagaaaccctcttcacaccacggcactggcgttaattgccagccgtagggggagacgagatccagaaacgccccgacgctgattttcagcgtattgacgcgaatactccggcgcaaagggcgctggcaggcggcaacgaaatcgtcgaaagagagatgagctggaagcgcctcgcgcatctgtgcgaggaattgttcgggaagaaatacggagttttgagccacgggcacaccacagggaaacattcaggcgcgcagtgtaacataaaggctccggcgcgttgacaccggagcctgcgagattaacgcggcagcgccgttccccattcgcgccactctttcggttcactttccagcagcaggaagtgcttacctgcctgcgccttaggcgccagaggcgtgccaggcggcgtcgcgaaggcaatgccgccgcgaatgaactgattaaaggtccccgttttgaccacgccaccggtcaggccgaagtccagcgagtagcctgaagcgagccagaacaccgagttgttgcgcaccagatgctgataacgctggctgatgcgcaggccgaccatcacgcgatcggacagattacccagcgtcaggcttgttactgtccctacttcaatgccgcggaacaggaccggcgtaccgatgcccagcgaaccggcttccggcacttcaaccacaatgctcagaccgtccaggtaacgggagtcggtgatggtggcctcctgcaactcaaattcacgacgtgcgttgccgcgacccggttcaacgttaatgtacggctgaagtatggtatcgagatgctcaacccctgcggcagaaatttgcggcgtaactaccgagaagcgcgagcctgcccgggcaaacgtctgcacatattccggataaagcacggcggtcgcctgcacttcattgcgtgcggtgatcagcgtcagcttctggacctgcccgatatcaatgccgagatagcggatgggcatgccttctgccagtttaccggcatcaaaggtgtgcagggtaatctgccccccgaccgcgcgcgccgcggtttcggacgggaagaggatccgcttgtcacctttacgcatgttgccgcccgcgccgctcaggttatcgaagctgatcgcaccgcgcagggcacgggagagaggcgatgcctgtacggtcagcccgctgccgttgagctgcactttcgcgccaccctcagcccagaacacgctgtttggcgtgagcagcttgcggtactccggcttgatatgcagttcgatatcaaacgcgtccgcacgaggacgaacggtgatcacttcccccacctcaaacttacggtaaagcacgacggagcctgcctggacatccggcagcgtttcagcgcttaaggtcagcgtggtggttggcaggtcgccaaggctattttcaatggctttgtccagattggcgaacagcggatagctttcgcgcagcgcacctttgctgcccggcagaatgcggatcccgccgttaacccactcgctggcgctggcgccgaggaactcaaccccgtccagacccaccttcacgtcgacccggctgttaaccacaaatttactgtcgccgtggaccaggttgccatactgcggatcgatggcggcggagaaggagacccctttttccgacagcttacgttcgaggacctggcccacctgcacaccgtgcaggatcagcggttgcccggcctcgataccgtagctttccggcgcattcagcgtaaccgtcaacacgcccggtttttgcagcagggctttatccgccggcgcgataacaaagtttttgttcggcgcgccttcaccggggatcagctcaaaggtgcttcccgtcagcagagaactaatgctggcgtcgctgagggagagcttcggattacgcagttcaatgcgcgttttttcccgtcaggagatcaccacactnnnnnnnnnnnnnnnnnnnnnnnnnnnnnnnnnnnnnnnnnnnnnnnnnnnnnnnnnnnnnnnnnnnnnnnnnnnnnnnnnnnnnnnnnnnnnnnnnnnnnnnnnnnnnnnnnnnnnnnnnnnnnnnnnnnnnnnnnnnnnnnnnnnnnnnnnnnnnnnnnnnnnnnnnnnnnnnnnnnnnnnnnnnnnnnnnnnnnnnnnnnnnnnnnnnnnnnnnnnnnnnnnnnnnnnnnnnnnnnnnnnnnnnnnnnnnnnnnnnnnnnnnnnnnnnnnnnnnnnnnnnnnnnnnnnnnnnnnnnnnnnnnnnnnnnnnnnnnnnnnnnnnnnnnnnnnnnnnnnnnnnnnnnnnnnnnnnnnnnnnnnnnnnnnnnnnnnnnnnnnnnnnnnnnnnnnnnnnnnnnnnnnnnnnnnnnnnnnnnnnnnnnnnnnnnnnnnnnnnnnnnnnnnnnnnngccggtaacggaaccgcccgcattgagggttaattttgtcagttgcccgacctctaaaccctggtacatcagcggggtcgaaccggctttcaggcctttggcatccggcagggtcagcttgacgatgacaccgcgctggctgtgcgccaggtcggcgtacaggccaaaggtatcttctgcggcggcagggctggagttagcaggtgagtcgaaggcgatagcgccattcaccagcgccgccaggctctcaagcttcactttcgcaccgcttaagctcaggtcagcatcgacgcctgagacgttccagaagcggctgccttttttcaccaggttggtaaaacggcgctcgatgagtacatcaatggtcacgccatctttgttcgggttaatggcgtagtcgtaaacgcggcctaccggaattttgcggaaatagaccagagaaccactgttcagcgagcccaaatccggcgcgcggagatggatcatcaaatcgccgttattcagccgatatttcggctgggtatccagcgcaacaaagtgatcctgtggctcacctttgccgggcatcatgccgatatagttaccgcccacaagcgcatccagtccggaaacgccggccagggaggctttaggcgtgaccagccagaactgcgtttcggcacgcagggcatcctgcatatcagacttaatgctcgcccggacctggattttgttcagccctttgccaagggaaatatcctgcacggtacccacttccaccccctggaagcgaacgggggtacgtccggcgacaatgccgtccgcagactggaaatcaatcgtgatggtacttccgcgatcttcatagctcgtccagataagccagcctgcgatcatcagcgcgatgacaggcagcaaccagaatggcgaaatgcggcgttttgttttaattctcgcttcagtcggcgaagcgggcgtttcctgactcatgtgcgtcccaaagtaagcggctgtccagccattccactgcaagaatagtcaatatcaccgcagagccgaaataaaaagctgcgggtcccatggtaaaagcaagtaactgatcgcgattgatgagcgacatcatcagcgaaatcacgaacagatccaacatcgaccagcgaccaatccaggtcacaaatcgcagaagcaggatgcgggtgcgtagtccttgttcgcatttaaagtgaatgctgataagcagcgtaaacatcaccaccactttggtaaagggcaccagaatactggcgatgaaaacaatggcggcgacccccacgttactgtgcgccagagagataatccccgaaaggatagtatcttcctgacgggcgccgttcacataaattacggagatcggcagcatgttggccgggaataaaaataccagggaggcgattagcgccgcccagcacttttgcaggctgttgttgcgtcgcaatcttaacggaatgtggcagcgtgggcacctcccgcgtttatccggaaaaccggtgtaatggcagcccaggcagacgcgcaggttttcatcaggccgggtcgcggggcgctgcgggtaaaatcgctcccaaagctgttcaacattgagatgaatcagggtcaaaatactcagcaggaccagtgaaataaacgcgaaaaggccgatgccgggttgtaaaaacgcataatcctgcaccttgatggaggccacgccaatgcctaccagatagatgtccagcatcacccactccttgagcttttccagcatgagcaggacagggcgcaggttcatccccagaatgttgccaaaccacaggtaggcaattgccgcgaccagcaccaacggcgcgccgacgacgcagaacagcaccatggcggccgtaagcggatcgccctggcgcgtcatctgccagatcccctgcaacacgttagcgtcaatacgcacgccaagcaggtagagctttaacagcggctcggtccaggcgaagggcatcagcagcagcatggtgaccgccattgccgccagacgcgtcaatgaccagtcccggccatcgcggattttggcatcgcagcatggacaaaaagcactttggtgcgatttcatcttcggcaacataaaaagcgtatcgcactggggacaacgctgataatgtgcacggggcagagcctggcttaccgtacggacaacgatctttcgtgtcggcgtaatttggggtgtttttagggccatcagtcgcacacagattagtattgttgaaagttataataactcatgaacggattcatcttgagcatgagcgcatttaatgcttattttaataggctatgcggtaactatgtaagataactaagtgattgaataatgaacaaaacagaattctacgcggatctgaatcgcgattttaaggcattaatggcaggggaaaccagtttcttagccactctggcaaataccagtgcgttactgttcgaacgcctttctgacgtgaactgggcgggcttttatctgctggaaggtgacacgctggtgctggggcctttccagggtaaactcgcctgcgtacgcatcccggtaggtcgtggcgtgtgcggtaccgcagtggcgacccgtcaggttcagcgtgtcgaagatgttcatgcgtttgacggccacattgcctgcgatgccagcagcaattctgaaatcgtactgccgctggtggttaaaaatcagattattggcgttctggatatcgacagcacggtcttcagccgctttactgccgaggatgagcaggggctgcgcgcgctggccgcaaacctggaaaatgttctggcagagaccgattatcataaattctttgcgagcgtcgcaggataatcaacggataacgtagcatttactgatagcgtcattataatgtcgcctgttcatgcctgcgcttgttggcaacgtccgttgtaatcaggaaatttcatggaaaatcaacctaagttgaatagcagtaaagaagttatcgcatttctggccgagcgtttcccgcagtgcttcagcgctgaaggtgaagcgcgtcctctgaaagtcggtatctttcaggatctggtcgcgcgcgttgagggggagatgaacctcagcaaaacgcagcttcgttctgccttgcgcctttatacctcgagctggcgttacctgtacggtatcaagccgggtgcgacccgtgtcgaccttgacggcaacccgtgcggtgagctggacgagcagcacgtagaacatgcgcgtaagcagcttgaagaagccaaagctcgcgtgcaggcacagcgtgcggaacagcaggcgaaaaaacgcgaagccgcagcggcaaacggtcaggaagacgcccctcgtcgcgagcgtaaaccgcgcccggcaccgcgtcgtactgaaaataacgatcgcaaaccgcgtgctgacaaaccagcagctaaagccccacgtgcgccgcgcgaagagccgcgccacaccccagtttctgacatcaatgcgctgagcgtaggtcagtctctgaaggtgaaagcgggtaacaacgcgatggacgccaccgtactggaaatcaccaaagatggcgttcgtgtacagctgacttctggtatgtcaatgattgtacgcgcagaacacttgttgttctgaaacggaggccgagcctggcatgaacactttttttaagctcaccgcgctggctggcctgtttgctataacaggccacgctttcgctgtggacgatattacgcgtgttgatcaaattccggtgctcaaggaagagactcagcacgcgacggtgagtgagcgcgtgacgtcgcgctttactcgttcgcactatcgtcagttcgatctcgatcaggccttttcggccaaaatctttgaccgttatctgaacttgctggattacagccataacgtactgctggccagcgatgtcgaacagttcgctaaacgcaaatccgaagtgggtgatgagctgcgctccggaaagctcgatctgttctacgatctgtacaacttatcgcaaaagcgccgttttgagcgttatcaatacgcgctgaaagtgctggaacgtccgatggacttcaccggcaacgacacctttaatctggaccgcagcaaagcgccatggccgaaagacgaggctgaactgaatgcgctgtgggacggaaaagtcaaatatgacgaactgagcctcaagcttacaggcaaagacgagaaagagatccgtgagacgttaaatcgtcgatacaaattcgctattcgtcgtctggcgcagaccaacagtgaagatgttttctcgctggcgatgaccgcgtttgcgcatgaaattgatccgcacactaattatctctctccacgtaacaccgaacagttcaataccgaaatgagcctgtctctggaaggtatcggtgctgtgcttcagatggacgatgactacaccgtaatcaactccatggtggccggtggccctgcgtcgaaaagcaaagcgatcagcgtaggcgaccgtattgtcggtgtggggcaaaccggaaagagcatggtggacgtgattggctggcgtcttgatgatgttgttgcgctgatcaaagggccgaagggcagcaaagttcgcctggagatcctgccagccggtaaggggaccaaaacccgtatcgttactctgacccgtgagcgtatccgtctggaagatcgcgcggtgaaaatgtcggtgaaaaccgtgggtaaagagaaggttggcgttctggatatcccaggtttctacgtcggcctgaccgatgatgtgaaagtgcagctccagaagcttgaaaagcagaatgtcagcagcgtgatcattgacctgcgcagcaacggcggcggggcattgaccgaggccgtctcgctttccgggctgtttatcccgtctggcccggtggtacaggtgcgcgataacaacggtaaagtgcgtgaagatgccgataccgatggtgtggtctactataagggtccgctggtggtgcttgtcgatcgcttcagcgcctctgcatcggaaatcttcgctgctgccatgcaggattacggccgggcattaatcgtcggcgaaccgacgtttggcaagggcaccgttcagcagtaccgctctctgaaccgtatttacgaccagatgctgcgccctgagtggcctgcgctgggctcagtacagtacaccattcagaagttttaccgcgtcaacggcggcagtacgcagcgcaaaggcgtgacgccggatatcatgatgccgacaggtaccgaagagacggaaacgggcgagaagtttgaagataacgcgctgccgtgggatagcattgatgccgcgacattcgtgaaatcaggtgatatgaaacagttcggaccggaactgctgaaaaatcacaacgatcgcatcgggaaggatccggaattccagtacatcatgaaggacatcgcgcgtttcaacgctttgaaagcgaaacggaacattgtgtctctgaactacgcccagcgtgagaaagagaacaatgaagatgacgcgacacgtctggcgcgtatcaacgatcgcttcaaacgtgaaggcaagcctctgctcaaaaaactggacgatctgcctaaggattaccaggagcccgatccgtatctggacgagacggtgcatatcgcgcttgatctcgcgaagctggaaaaagagaaacctgccctgcaacctgctccgacaaaataatcccccaacaggcacaagaaattgtgcctgtttctttatgtacctcctccttccgtcaggcagatttccaattgtgtaaagttgtgtctttctggtgacttacgccgtctggatgcttgaaaatagccgtaatacccatacgatgtgggtaatcgcatagtgcgttttgttaaactgaggttaaaagaatattatgatgcgaatcgcgctcttcctgctcaccaacctggcggtgatggtggtattcgggctggtgctaagcctgacgggaattcagtcgagcagcgttcagggtctgttgattatggcgctgctgtttggtttcggtggctctttcatttcactgctgatgtccaggtggatggcactgaaatccgtgggcggtgaagttattgagcaaccgcgtaacgatatggagcagtggctgatgagcacggttgctcagcagtcaaagcaggcgggcattgccatgccgcaggtagccatctaccacgcgccggatattaacgcgtttgctaccggtgcgcgtcgtgacgcgtccctggtggccgtcagtaccggcctgctgcaaaacatgagccgtgacgaagcggaagcggttattgctcacgagatcagccatatcgccaatggcgatatggtcaccatgaccctgatccagggtgtggtgaacaccttcgttatctttatttctcgtattctggcacagattgctgccgggtttatgggtggcaaccgtgatgagggtgaagagagcaacggcaacccgctgatctattttgctgtttcaatggtgctggagctggtgttcggtatcctggcaagcatcattaccatgtggttctcccgtcatcgtgagttccacgcggatgccggttccgcgaaactggtgggtcgtgaaaagatgattgctgcgctgcaacgtcttaaaaccagctacgagccgcaggaagcaaacagcatgatggccttctgcatcaacggcaaatcaaagtcgctgagcgagctgtttatgtctcacccgccgctggataaacgtattgaagcgctgcgtagcggcgaatacctgaagtaacgtaatcgggttgaaaagaaccgggctggagccatcctccgcccggtttttttatgcctgcgcctttggctgggtgacgcgaaggccgctaatgacagccgcgagggtcgccagggtccctgcggtaatcagcgcaacgtgtgtcgcattcagcccggcaaggttaaacatcaacgccaccagtgcggccccggtgctttgccctaacagtcttgccgtgcccagcatcccgctggcgccaccgctgcgatgacgtggggcagaggtgataatcgtgtggttattaggggactggaacagaccaaaaccggccccgcacaggatcatgcgccagataatatccagatcccccggcgaggcgggcaggagcgccagcgcaaacagccccaccgccatgacaaccagtccaatcgcccccagaagcccggcatggacgcgctcaataaggtaaccggccagcggggccatcaccatggttgccagaggccagggcgtgagcagcaagcctgtctccacttccgaacggccaatcacgctctgcaaaaagaacggcagcgcaaccagcgccagcatctgggcgcagaacgagcaaatggaggtacaaatggatagcgaaaacagcggaatacgcagcaaatccaccggcagtaacggcacgggcagcgccagctgacgtcgtacaaagaaaaagccgatgataagcatggcaacgatttctgtggtaatgagcgacagagactgtccctgcgcaaatccgctcagcgcggtaatcagcaggccaaaggtcagcgcgttcatcacagcgctgggcagatcgaaacgtggcatggtgtttttcggaccattttccggaagatagcgcagggcgaagaagatcgccacaatgcccagcggcacgttaatggcaaacagccactgccacgaggcaacggacaggatggcggcggcaatcgtcggcccggcggcggacgacacggccacaataaaggagttaatgcccatcccgcgccccaggtggcggtgagggtagataagccgtatcagggccgtgttcacgctcattagcgccgccccgccaaagccctgtgcgatacgcgccagcgtaagggtgtgcagtgaatctgaaagggcacagaagagcgaggtgagggtaaagaccaccagcccgcactggtacacccggcgataaccaaacatatcgcccaggaaagagagtgacaaaagggaaatcacaatcgctatctggtacgcgttgacaatccagatggagctggccggcgaagcattcaggtctttggcaatggtaggaagagccacgttggcaatcgcaccgtcaaggacagccatcgaaataccgatgacaatagtggcaattgccccgtaccgctgcggtaagggcaggccatcagaaacgtttttttgcatggggaaagaatgactcagcgtgaaattattttcagagtaactattttagcatcgttatttcggttttatgtcgcagatttgtaacgaagtaaacccagatagattgcagcacgcatcacacgaatttataataaaaaccggttctgatttttataaaacactctccatgaggtgataaatggcaatcgcagatttggataagcagccagattctgtttcttccgtgctgaaggtgtttggcatcttgcaggcgctcggagaagagcgtgaaattggtattacagagttgtcgcagcgtgtgatgatgtcgaaaagcaccgtttatcgctttttgcagacgatgaaatcattgggttatgtcgcgcaggaaggagaatcagaaaaatattctctgaccctgaaactgtttgaactgggcgcccgtgccttgcagaacgtggatctgatccgcagcgctgacattcagatgcgtgaactttcacgactgacgaaagagacaattcacctcggtgcgctggatgaagacagcattgtttacatccacaaaattgactccatgtacaacctgcgcatgtattcacgcatcggtcgtcgtaacccgctatacagcaccgcaattggtaaagtactgctggcctggcgcgatcgcgaagaggtgaagcaaatccttgacggggtggagtacaaacgcagcaccgaccgcacgattaccagtacggaagaactgctgagcgtgctggataaagtgcgtgagcagggttacggggaagataacgaagagcaggaagaggggctgcgttgcatcggtgtgccggtgtttgaccgcttcggcgttgtcattgcgggcctgagcatttcgttcccaacgctgcgtttctctgaagagcgtcttcatgaatatgtggcgattctgcataccgcagcgcgcaaaatttcagagcagatgggctataacgattatccgttctgatcgacgccaccaataaaaacgccgcacttttgcggcgtttctgtaagcgaagttcagcgctgattaaccgttatcaaccacaacagatgatttacgcagcacaggacagttggttaacccgatgatcccgctgtcggaatggatgtactgagccgtgcttatcccctgggcggtaagatatttacactggatacccagacccgcggcattttctttgctccccattaatacgccgtacccacttaataacaggccgatccagacaatggccagtacaattactgtacgaataagtaaacgcatcgttgcctcttttttatttgttgtcatagagtaagcgtaacggctttacgcagtgaaacaagtgcatgattccgaaaagcgtctgttgaaggtacagttagcccctgtttaagataaccgtgataacctggctgtatcaggtcataagacggagtgtggagtgaaaaaaatacgctgggtaattctgattatagtgttgatagcatgcgtggtgctgtggacgcagactatcaatgtgatgtgcgatcaggatgtacagttctttagcggcatttgttcaatcaataagtttatcccctggtagagaccatttttacgctgagtgatgtccttacgcggcggcagtggtaaaatggcggtttttactgaggtggtgaaatgggtgagttactgaattcggggctgctgagcattgcatccctggtaatgtctttggtggtgctggtcgttggnnnnnnnnnnnnnnnnnnnnnnnnnnnnnnnnnnnnnnnnnnnnnnnnnnnnnnnnnnnnnnnnnnnnnnnnnnnnnnnnnnnnnnnnnnnnnnnnnnnnnnnnnnnnnnnnnnnnnnnnnnnnnnnnnnnnnnnnnnnnnnnnnnnnnnnnnnnnnnnnnnnnnnnnnnnnnnnnnnnnnnnnnnnnnnnnnnnnnnnnnnnnnnnnnnnnnnnnnnnnnnnnnnnnnnnnnnnnnnnnnnnnnnnnnnnnnnnnnnnnnnnnnnnnnnnnnnnnnnnnnnnnnnnnnnnnnnnnnnnnnnnnnnnnnnnnnnnnnnnnnnnnnnnattgagctgctggaagcattgctcgatcagcagaaacggcagactgcgctgctgcgtcgtttgtgcgaagccaacgagccggaggagaaagcggtaccgaaggacgctgttgctcaacaacaagacgaggaagacttcattcgcctggtagctgaacgatagtctgccaggagcggggaggtggcctgacgtacggcgtaaatcccctcccttatcaaatgcatcccacaacttcccggcatttaattaagcagcagttaactcatgttttagcacactgaaaactggcgaatatttatccttatttaacaaattcagtttcgttgaataaatagtgtgctttatctttcctgaagtgttttatttttatcgaaacgttttgcttgccttgttttgaggcagagtcataaaaatttcattattttggtgcagaataacacttattaaatggtggtttttaatacagttagcaaaatgtaattaacatcgtatattccctgacacatgttggtgcgttgcaatgttttcagcataacttttcacaaaatgttctaactcagtcattcttttaaagaaactctgggattgggatggacgctttgaaatgattgagctatgtttaaaaagtctttgattacagggcgcgtcaacgcaccctgcgggcagtgaggtcaggtggcgcttcatttgacaattcgcataactgtgcagattgttatggagtaacgtctgaatttgtgcggcggatcgagacacgtttaaaaatggcttgccatattaaacgttgtgtgtgataacacgttttgggtcaaacgaggtacagttctgtttatgtgtggcattttcagtaaagaagtcctgagtaaacacgttgtcgttgaataccgcttctctgccgaaccttatattagtgcctcaagcagtaatgtctcagttttatctatgtcaaagcccgcgggctaagaaaacactctaaggaattttgcaaatggcaaagattaaaggtcaagttaagtggttcaacgagtctaaaggttttggtttcattactcctgctgacggcagcaaagacgtgttcgtacacttctctgcaatccagggtaacggcttcaaaactctggctgaaggccagaacgttgagttcgaaattcaggatggccagaaaggcccagctgcggttaacgtaactgctatctgatcgaatcactgctgactgaagcgctcagcgcttcgatctcagacataagcctcgccgatgcggggcttttttattcgcttatttttcaaaatattacgtaatcctcctctgttattatcttgttgcaaacccgcgagattattagcattgttttcccgccttattatccgcttttctcgttaaatcagggcgttgattaacagccctggggttaaggtgaaaaaaaagacaataaccaccaccggaaattttactccggcacgttttgcacttctgtgtctcgccatcttttgtagccttgcgtttctgctgggccgcgtagcgtggctacaaattatcaaaccggataatctggtgaagcaggaggatatgcgctccctgcgcgaagtggcgatagacgccccgcgtgggatgattgttgaccgtgaagggcgaccccttgcggtgagcgtacccgtccaggccgtctgggccgatcccaaaacagtgctgcaaaaaggggggatcggttttgactcgcgctggcaggccctggcaaatgccttacacctttctctgagcacgctcgcatcgcgaattaacagtaacccgcacgggcgatttatttacctggcccgtcaggttgatcccgcccaggcaaagtggatcgataagctgcgtctccccggtatcaaccttcgcgatgagtcccgccgcttttatcctgccgggcacgtggcggcgaacctgattggcttcaccaatattgatggtcagggcattgagggcgtcgagaaaagctttaacacgcagcttaccgggaaggcaggcgtgcggctggtcaggaaagatcgctacggacatgtggtggagaaccttacggaggtggctcccgtacctgcacataatatccagcttagtatcgatgaacgcctgcaaactatcaccgaagacgcgctggataatgccgtggcgtggaacaaagccgagtcaggcgcgtcggtgctgattaatatccggacgggcgaaattctggcgatggcgagcttccccgacttcaatcccaacaaccgggaaggggcaacgctggatgattttcgcaatcgcgcgatcagcgacacctttgaacctggctcgaccgttaagcctctggtgctgatgacggcgctacagcaggggctggtacagcctgacagcgtgatagatacgcatccctacaccattgatggtcatcgtattcgtgatgtgggctactaccccgagctgacgatgaccgggattttgcaaaaatccagcgacacaggcgtatcccgtctttcgctggcgatgcccgtgcaacggttactggatacctataaaaactttggttttggcgagagtaccgggcttggtttaacgggagaaagcgcaggtttactgccgcagcgaaaattctggagtcagttagatcgggcgacctttgcctttgggtatggcctgatggtaacccccctccagctggcgcatgtgtatgccaccatcggcagctacggcattgaacggcctctgtccatcacccgtattgacccgccggtgattggcaagcgggtgatgcccgaggaaattgttcacgaggtggaacatatgatggagagcgttgcgttacccggcggtggcggggtcaaagcggcggtgcgtaactatcgcgtggcgataaaaaccgggacggccaaaaaaatcgatgaacatggtaagtatgtggataaatacgtcgcctataccgcaggcgttgcgcctgccagcgatccccgtttcgcgctggtggtggtgatcaacgatccgcaaaacggtgcctactatggcggggccgtttctgcgcccgtgttcagcgaaattatgggtaacgtcctgcgcctggaaaacgttaagccagacgggctgccggcagattctgaccatctgatcgtgatgcgtcacccagccgtttataaccctggcgaatagcggtacacttcgccttttggtttacgccctggagctgtcatgtctttcagttgtcccctttgccacgcgccgctgacgcgcgcggagaaaacgtttatctgtccacagggacatcagtttgaccgggcgaaagagggctatgtaaatcttctgccggtacaacataagcgctcccgggacccgggtgacagtgcggagatgatgcaggcgcgccgggcgtttctcgatgccgggcactatcaaccgctcagggatgccgttgtcgccttactccgtcaatatctgacagaaggcgcatccgccatgctggatatcggctgcggcgaaggttactacaccgccacgtttgctgacgtggcggctgagaagggtgccgaaactttcgggctggacgtgtcgaaagtggctatccgtgcggcagccaaacgctattcagcggtaacgttctgcgtggcctccagccaccgcctgccgtttgaggaagcgagtatggacgccgtggtgcgtatctatgcgccgtgcaaggcagaggagctggcgcgcgtcgttaagcccggcggctgggttattaccgtcacgccagggccgcgtcatctgctggagctaaaagggctgatctatgatgaagttcacctgcatgcgccgcactctgaacagctggcgggctttgcgttaaagcaggcgcagtcggtagcgtatgaaatgacgttgcagggaagtgaagcggtggcgttactgcaaatgacgccgtttgcatggcgggcaaaaccagaggtgtgggaaacgctggcagcgcagacagaatttcgctgccagacggatttcagcattcattgctggcagcgcgaaggttaacccgcgaagtgtgcccaaaggatttgggcaccaatcccgatcaacacgataccgcccagaatttcggctcgtttgcctaacagcgggccaatgaaccgacccaccatcatccccagcgttgacatgatcagcgtggcgcagccaatcgccagcgcggtggcgataatattgacctgcaaaaacgccagaccgacacccacggccattgcatccaggctggttgcgatggcggttgtcaccagaagccagaagccgtggcgttgcagcggcgcatcatcttcatcgccgttaccacgaaagccttcaatcaccatgcgtccgccgaggaacaccagcagcacgaaagcaatccagtgattccactccagcacgaactggctggcgagcatccccagaccccagccgataagcggcgtcagcgtttcgatagcaccaaagatgagaccggtacgcagggcgtcggaaaatttaggtttatggagggtggcacctttaccaatagaggcggcaaatgcgtccatggacatgccaaaagccagaaggatcgtagcggagatattcataagagcgtccagaccggggatatccatatgacacatcactgcccccagtaaacagcagttgatgtatctatggtctcgcctgatcgcttttggcacagtcagtgtgctgaaaacgatccgtacgcgccacgtttttcaacgagtatgttgacacgtacatttcccgcaggcaggaaatcggctactccccaacgacgggcgcaaccttaacatattttgagaatataaaacaacaacgaagatggctttatatagccactatattgataacgattttcatttagatttatgcgtgaaaatatcgttaacaaatataaggcaattaacagaggagatatagcaccggctatattgctggtttaagaataatgcaatatatagccgatgctataatattaactcattgagttttaacgagtaatttgtagatcttttccaggtcatcaatatttttgacccggatgagcaggcggcgttgttctaattgcatcaccagaaccccgtcttcggataaattcatctctttaatacggttatattctatccagacattagcgaagaagaatccgtgttttttaaaaatgagttttggcgagcggatccagaacaggtaaatcgccattaatgccagcgcacataataaccatgtggttaatattgcgccgtggctggtcacattattgtaaatcaggatgactaccagaccggcgaagataaacgcatcaatgcgtccacggcgtaagaggggaagggtcagcagcgtctcgccgtggcggcgaggcataatgaactcgtcatagatcgcgtaagccagaagggcaacaataaataaaaccagtacggtgtccgtgacagtcattcatcctccagataaaaagaccgggggcaagcccccggtcggtaacgcattttattacagacccagcaggccgacggcgtagcccgcgataccgatgacgaagaagccaacgatgatccacagcgggttcactttcttacgcagcagccacatacaggcgaaggttagcagcagcggtaccaggcccggcatcagctggtccagaatcgtctgcacggtggtaacgcgcgtctgaccatcctgaccagtgatcgtcgataccaccagcgggatgttcacgtgcgtccacttgttaaccagcgcccccattacaaacaggccgaggattgacgccccctcagtcagtttttgcaggaagccgccgcccatatccttaacgatatccacccctttacgataaccgtacgccacgccgtagtaacgggtcagcagacgcaccgcgttgaacaggatgaagaacagcagaggaccgagcaggctgccgctcatggcgatcccggcgcccagcgccgcaaagaccggacgcacggtaccccagaagatcgggtcgcccacgcctgccagcggccccatcagaccaactttgataccgttgatggcaccatcgtcgatctcagccccgttcgcacgctgctcttccattgccagcgtcacgcccagaacaggcgccgcaacataaggatgggtgttgaagaattccaggtgacgcttaattgcctgacggcgtgcttcgttgttttccggatacaggcgtttgatggccggcaccatggagaagcagaagccgagcgcctgcatacgttcgaagttccatgaaccctgaaacaggttagaacggatgaacacgccacgaatatcacccggagtgagttttttctcagtggtagtttttgtcatatcaaccatttcgctcacctgttagtccagttcgttatcgagatcgttgttaccagcagcctgcgcaggggcacccgcgacacggttgtatttcgggctgagctggatataaagaatcgccatcaccgcaccaatcacacccagcgcaaccaggttgaagttggtgaacgcagcggtaacgaagccaaggtagaagaatggcatcaggtagcctgcgcgcatcatgttgatgaccatcgcataaccgaccaccacgatcatacccccggcgatattcagaccgctggtaaccacttcagggatcgcattcagcatgccctgaacttcgctggtaccgacagaaatcgccacgataaccgcagggattgcgatacgcatcgcttgcaggaacagggaagaaacgtggatccaggagagcgcggtgaggttgccgttttcggccgccttatccgccgcgtgctggaaggcaacggtaatagtacggacgataatggtcagcacctgacccgctgcggccagcgggatggccagcgcgataccggcaccaatactctgatgaccagcgataaccagaacggttgaaataatggacgccagcgcggcatctggcgcaactgccgcaccgatgttcatccagccgagggcgatcatttccaaagtaccaccgatgatgataccggttttcatgtcaccgagaacggcgccaatcaacgtacaggccaccagagggcggtggaactgaaattcatcaagtacggactccatacccgcaatacatgcgacgatgaacaccagcacaatctgaagagtagtaatctccattgcacttctcctattacataagctctatatgaaaaaccggcccgggcttatttccccactttgccgatcaaatccatcattttcagtttctggtccgtggaaaccttacgggcttccagttcgataccgcgtgcattcagtttgttgaaggcctcgatatctttcgcatccactgaaatcgcgttgttgacctgcgttttgccctgacggaatgccataccgccaatgttaacggaggtgattttcacgccgccttcaacaatgcgttcgacgtctgtcgggttggtgaagagaagcatcacgcgctcacccgcatatttcgggttgttgtaaacgcggatcattttggcgacatccacgacgtgcgcggtgacgcccggcggtgcaacctgggtaagaagggttttacggacagtgtcggcggccacttcgtcactgaccacgatgatgcgttgtacgttggtctctttggtccagcgtgttgccacctggccgtggatcagacggtcatcaatacgcgcaaggccgataaccatgtaatcgttcggacccattggcttcgccggtgctgccgcccttggtgcagcaggggcaggggccggtttttcaaccggctgcgctttcagcgccttcacgccttcgcgaccggtttccaccgccagtgccaccagttcatcaaaacctgggttgtcgtcacgcgccatgaaggtttccaccaacatcgggatattcaccccggcgacgacttcataatgctctttatcgacgacaatgcggctggcagcgttgaacgggctgccgccccatgtatccacgagaaacagcacgcctttgctggtatccagcttctcaagctgagcagtgtatttttcaatcagcgtctcggcattttcaccgggaacgaaatcgatccagccgacgttttcctgctcgcccaacagcatttctgccgttttgagtaactgctccgcagcccaaccatgtgtgcctatgacaatagcaatggtcacttgctacctccttttattatcatgtatacgtctgccaggcaggcgtactgagaatcgtattggcgaaccgaatcgattcagataagggttagagttcaaaaaactaagacttccgcgaattattttagatagtgaaaaaataatttatgtgatgaagatccgtaatttagctaagccttacagatttttctttaagttaatccgcgtgtgttacagaagtttgcaaaggaacgtaaatctttgctaaaaaccaattgtctctgatatgtttagcgtccgtttaattattcaggagtatagggctacagcccactatatggaccgtcaccgacgtcagtcatcttccaggccactccgcgccttattcatcggcgatcttcgccacgcatcgactctcattccttttgaaatgcccgaaattagcggggcaccgttttgtcattcctttagcaggagcgtgtcatggaattcttaatggacccgtcaatctgggtaggcttgcttacgctggtcgtgctggagatcgttctcggtattgataacctggtgtttatcgccatcctcgcggataagctcccgccgaaacagcgtgataaagcccgtctgatcggcctctcgctggcgctgatcatgcgtctgggcttgctgtctgtgatctcatggatggtcaccctgacgaagccgctgttcaccgtcatggatttcaccttctccggccgcgatttaatcatgctggtggnnnnnnnnnnnnnnnnnnnnnnnnnnnnnnnnnnnnnnnnnnnnnnnnnnnnnnnnnnnnnnnnnnnnnnnnnnnnnnnnnnnnnnnnnnnnnnnnnnnnnnnnnnnnnnnnnnnnnnnnnnnnnnnnnnnnnnnnnnnnnnnnnnnnnnnnnnnnnnnnnnnnnnnnnnnnnnnnnnnnnnnnnnnnnnnnnnnnnnnnnnnnnnnnnnnnnnnnnnnnnnnnnnnnnnnnnnnnnnnnnnnnnnnnnnnnnnnnnnnnnnnnnnnnnnnnnnnnnnnnnnnnnnnnnnnnnnnnnnnnnnnnnnnnnnnnnnnnnnnnnnnnnnnnnnnnnnntcaaagccacaacagagctgcatgaacggctggagaaccggcagcacgatgatggccacggtaagggttacgccagcttctgggtggttgttctccagattgtggtgcttgatgcggtcttctctctggatgcggtgattacggcagtcggcatggtgaaccatctgccggtgatgatggcggcggtggtgattgcgatggcggtaatgctgctggcgtcaaaaccgctgacgcgtttcgtcaaccagcatccgacggtcgttgtgctgtgtctgagcttcctgctgatgattggtctgagcctggtggcagaagggtttggcttccatattccgaaaggctacctgtacgccgcgattggcttctcgattctgatcgagctgtttaaccagattgcgcgccgtaactttattaagcagcagtcgaatcagccgctgcgagcccgtaccgcagatgcgattctgcgactgatgggtggacgtcgtcaggtcaacgtgcaggctgataacgagaaccgtaacccggttccggtgccggaaggcgcgtttgtggaagaagaacgctacatgatcaacggcgtgctttcgctggcttcccgctccctgcgcggcattatgacgccgcgcggtgagatcagctgggtggacgccaacctgagcgtcgacgaaattcgtcagcagctgctctcctcgccacacagtctgttcccggtctgccggggtgagctggatgagatcatcggtgtcgtacgcgcgaaagagatgctggtggcgctggaagagggcgttaacgtcgaggccgtagcggccgcgtcgcccgccatcgtagtaccggagacgctggatccgatcaacctgctgggcgtattgcgtcgtgcccgcgggagctttgttatcgtcaccaatgaatttggtgtggtacagggcctggtgacgccgctggacgtgctggaagccattgccggtgaattccctgatgcggatgaaaccccggaaatcgttgccgacggtgacggctggctggtgaaaggcaccaccgacctgcacgcgctctcgcacacgctgggcgtcgaaaacgtggtcaatgatgatgaagacattgccaccgtcgcggggctggtgattgccgttaacgggcagatcccgcgtattggtgatgtgctggagctgccgccgctgcaaattaccatcgtcgaagccaacgactatcgcgttgatatggtgcgtattgttaaagagcactctgcacacgacgaagaagagtaacgctatctagcgtaacggcagtaagggcacgatgtgtccgttgtgacgggctggcggagagtgactttccgccagccatttcggaaactcgcgcagcggcattggccgcgcatacaagtacccctgcaaaatatgtacgctgtgacggcgcaggtagcgtgactgctcctcggtttccaccccttccgcaaccagttcaatattcagccgctgacccagcgcaataataatatccgttaccgttgagttcacggcgtcggtgccgatcgcggtggtgaaggatttatcaattttcagcacatccggatgcagtttttctagccatgaaagtgagctgttgccggtaccaaaatcatcaatcgcaagtttcacccctttgcggtgcagctcccgcactatgcggtaatccacatccagcaacgcatcgcgttcggttaactccacgatcaactgttgaacagggctggcgttaaaccagatgcggttgagatcctggatcagcgcagcgcggcgaaaatggctggcggccacgttaatgccgatatggaaatcgcgcgaggccgggaaatagcctatctgccgcaccgtttcgctgatgacgtagcgggtaagcggaacaatcaggttatgttcttcggccagagggataaagacatcgggcgaaatccatccctgacgcgggttgttccagcgcaggaggatctcgacgccgacgcattcccgggtgcgggcattcaccagcggctggcagaagagctcaaactccctggccgcaattcccatattgatttcccaggtgaaactgatgcgccgcgcggtggcgagccaggcgatatagcccatcagtaagctgagcattaacgccagcggcagctgggtgggcagattctttaacgccatttcgccaggcccggggccgctcaccgtgacgctgaaagggtaatgctgtgacgattgttccagcagggaggcgttttcatcgaaggtcggcgtagtcgtcacctgttgcccgtcgcggaggaagttatctcctactctcaggacaacgtcggtgatctgcggccgctgcggctcgagaatcattttagtgatgagatcgatattcaccacctccatcaccccgtcgttgccgtcgctcgcgaggggagaccactgaatcagtaccgggctgccttttaccagccaccgatcggtcagcagcaacagcctggattcactgaccggcagctccggcacaaactcactgacgggcacattacggctgccaaagacgcttgagcaatacagtattccgtcttgaatgagggcgatggagcgtacggtctggaggatcgccgcctgttttcgcaggatcagatttgcttcggaacagggtatgccaaccagtgaaagtagcgtttcccgctgggcctctaacgaaagaagcaccttatcaagcgcacgcacggtgtggtgggtaaagtcgtggatccgatcctgatttatgttgcgctgtgaaataaagcgaatacccagcgtcaggacgagcgtaacgagcgcaaccgtgacacagacgataacgcgttttcggcgatagtctttaatgatcgtttgtgcagtttgcatgaacggtcgcctgttaagcaccggccggaaaagccagacgcaacagtgacagtgtagtggggaatacgtgaagcgacgagacgagaggggaaaattcgcccatccgttgcagatgggcgaaaggaaggcttagtcgcactgcaccttaatggccagaccgccgcgcgaggtctcacggtacttcgcgttcatgtccttgccggtttcgtacatagtttcaataaccttatccagcgacacgcgtggctcgctggtacggcgcatcgccatacgtgaggcgttgatcgctttgacggaggcgatggcgttacgctcaatgcacggcacctgcacctggccggcaaccgggtcacaggtcagaccgaggttgtgctccataccgatttccgccgccacgcacacctgctcagggctggcgcccagcagttccgccagacccgctgctgccatagagcaggccacgcccacttcaccctgacagcctacttcggcaccagagatggacgcattcattttgtacagcgcgccgatagcacctgccgcgaggaaatagcggatatagatgtccggcgtcacgggctcaataaagtgatcgtaataggccagcaccgccggaacgataccgcacgcgccgttggttggcgccgtcacgacgcgaccacccgctgcgttctcttcgttaaccgcgagggcaaacatgttcacccagtcgaccacgttcattgggtcattggagaacttgtcggtagtgaccagcatgcggcgcagagcagaggcacgacgcggcacgcgcagtggcccaggcagaacaccctcggtgttcatcccgcggtcaatacaggcgcgcatggtttgccacacgttagcaaaatagtcttcgatctctttcttgctgtgcagcgccagttcgttctgcatcaccatgcctgacagggacagaccggtctctttgcagtagcccagcatctcggtggccgatttaaacggatagggcacattgacgtcgcccgcgctctctttaccaaagtgttcttcgtcaacgataaagccgccgccgatggagtagtaagttttgctgtagatctctttttcgccactccaggcgtggatggtcatgccgttttcatgcagcggcaggttgtcgctacgaaaacgcatcccgtcatcctgcgggaagtccacttcgtgctggccgttagccagcagcaaacgaccgcgcgtttccacgtcgcggataaatgccggaatggcatcaatatcaactgtgtccggcatattgcccgccagacccataataatggcgatatcggtgtggtggcctttacccgttaatgacagtgaaccgtaaacgtctacggcgacacgggtaacgctttccagtaatcctttttcgaccagatcatcgacgaactgtttaccggccttcatcggccctacagtgtgggaagaagatggaccaatccccactttgaacatgtcgaatatactaatcactttcacactcctgacagggttactggggttccagtaacgatgttataactgcgcatagtgtaagagggaacaccaaccacggcttaactattcacatgaattaaactaatggttaacgatggttttgctaatagcgcgacgccgatcgcaaacctgccagaaaagggtggaatgtaaagtatagtcaaggcttcaggccgatttgcagggccagctcacgaatgatgcctgccgtcatgccccagacaaaataatgctgataccacgacagccagacccgatgatcgtgtccgcggcggtgaatatccagcgggtgatagcgacccagacgaagggcctcttccagcggcatttcgaataccgctgaaacttcatcgacgctggcgtgatactgaagatcgggcggaataatgccgacgaccggcgtgacctgaaaaccggttacgctgtctactggcggcagcacgccgatcacctcgaccgtctccggggggatcgccacttcctcatgcgcttcgcgcagcgcggcggcaatcagggatgcatcggtgctgtccaccgcgccgcccgggaacgcaacctgaccggcgtgttttcgcatatgcggtgagcgctgggtaagcaacagacccggctgctcacgacgcacgaccgggatcagcaccgccgcctgacgttgattcagcgtggcgcggttaacctggggccgcagaagctgaaagcgcgacagaaaatcatccagcgtcaggttgtctttcttcaccgtgagttctccagttgtttcaggatacgattcactttatcaaaggtttcctgatattccgcctccgcctggctgtcggccacaatgccaccgcctgcggaacagtacaggttaccgtcgcaggccgtcagggtgcgaatagtgatgctggtatccatggtgccgcagaggctcacatagccgatgctgccgcaccaggcgttgcgccgatgcggttccagttcgtcgatgatctccatcgcccggaccttcggcgcgccggtgatggagccgcccggaaacgcggcgcggagcagatcgcaggcggttcgtgaggctggcaggcgtgcggtgatggtgctgaccagatgatgcaccgccgggaatggctccacgacgaacagctccggcacgcgcacgctgcccggctcggcgacgcggccaatatcattgcgcatcagatcgacaatcatcaggttttcagcgcgatctttcggcgaagctgccagcgtcttcgcctgctggcggtcggcgtcggggttggcaaggcgcggcagggtgccctttatcgggcgggtctgaatcataccgtcagccaggtgaataaaacgctcaggcgaaaggctgaggatggcgccgtgttcaaggcgtaaaaatgcgctgaacggggccttattgctggcattgaggcgggtaaaagcctgccattcgtctccctcgtacgccgcctggaaacgctgggcaaggttgacctgataacagtcgccgctgtgaagatacgcctgcacgcgggagaatttttccgcgtattcctccgcgctcatgttcgagcgccagccggaggtcagcataaagcgttccggggcagcgggccgttgcgcctcaagccaggccagacgcgcctgcacgtcccggtggctcagcagggaaaccgtctgcttacggtgatccacgatcagcgcccagtcatacagccccaccgccatatccggcagggaaatatccgcctgcgcatgctcgggcagcgtttcgaaacggcgacccagatcgtaaccaaacaggcccagcgcgcccccctggaaaggcagatccggatccggtgtggcagataagcccagagcctggatctcgttctgaagccgcatcagcggatcgtccgttggcgacagcgcatcggtcgtcagcgttttaaccgggtcggccaccagaatatcaaagcggctgtaggggtgattcgcatggccggagtgcagcagcatggcaaaaggaaggtggctcagacgggcaaaccagaactcggcggcgtctgcacgccagggcaaggtcataacagtggggaagcgcatgttcatgtatggcatactaccgggcagcgtgaaataattagcgcgaataatttagcaggagttaacgatgtttgcaggtttaccttctctcagccatgaccaacagcagaaagccgttgaacgtattcaggagctgatgtcccaggggatgagcagcggacaggcaatttcccaggtcgcggaagaacttcgcgccacccataccggcgagcggatcgtggcgcgctttgaggatgaagatgaagaataaccggcttacactgccgcgataatcttgatctcaaccttatattccggtttcatcagcgtggcctgtacggtgcagcgtacaggcgcgtgacccgccacgacccacgcatcccaggctttattcatcgccgcaaaatcgtctttattcgccagaaaaatcgtcgcatccagaatgcgggatttatcgctgccctgtttttccagtacggcgtcgatctgcgccagggtgttcgcggtctgttcgaaggcgtcggcgtccaggttggcagggacgccggtgtagtacagcgtctggttgtgaataaccacatcagaccagcgggcttcggcatcaatgcgcgtaattgtcataaacgtatcctcgttatctttcgtcgtcaggcggcaagactgccataatgttccgccgtcgtcactatttggggtggcaccggagagaaggggctgacataatccctgtgcaaaaatacagtgagagaacaccgtggcagacgatttttccccagaaggtcagttagcacaggctattcccggctttaaaccgcgcgaaccccaacgtcagatggcgcatgctgtcgcgcacgctatcgacaaggcgcagccgctggtcgtggaggccggtaccggtacggggaaaacctacgcttacctcgctcctgcgctgcgggcgaaaaagaaggtgatcatctctacgggatcaaaagcgctccaggatcagctctacagccgcgacttacccacggtggcgaaagcgctgaaatataaagggcgtctggccttgctgaaagggcgttctaactacctgtgtctggagcgtcttgaacagcaggcgctggcgggcggcgacctgccggtacaaaccctgagcgatgtgatcgtcctgcgcgcctgggccaaccagacggaggagggggacatcagcacctgcgcgagcgtgccggaagactcccagcctggccgcnnnnnnnnnnnnnnnnnnnnnnnnnnnnnnnnnnnnnnnnnnnnnnnnnnnnnnnnnnnnnnnnnnnnnnnnnnnnnnnnnnnnnnnnnnnnnnnnnnnnnnnnnnnnnnnnnnnnnnnnnnnnnnnnnnnnnnnnnnnnnnnnnnnnnnnnnnnnnnnnnnnnnnnnnnnnnnngcctcggcagcgactgcccgctgtataaagactgttttgtggtgaaagcgcgtaaaaccgcgatggacgccgacgtggtggtggtgaaccatcacctgtttcttgcggatatggtggtcaaggacagtggtttcggcgagctgatcccggaggcggaggtgatgatcttcgatgaagcccatcagctaccggacatcgccagccagtattttggtcagtcgctctccagccgtcagcttcaggatctggcgaaagatattaccattgcctatcgcaccgaactcaaagatacccagcagttgcagaagtgcgcggaccgcctggcgcaatgcgcacaggatttccgcttacagcttggcgagccgggctatcgcggcaacctgcgcgaactgctcgcagacaaaaatatccagcgcgcgctgctgctgctcgatgatgcccttgaactctgttacgacgtggcgaagctgtccctcggacgttcagcgctgctggacgccgctttcgagcgcgccacgctctaccgtgggcggctgaagcggctgaaagagatcaaccagccgggctatagctactggtacgaatgtacctcgcgccacttcaccctggcgctcacgccgctgaccgttgctgataaattcaaagaggtgatggcgcaaaagcccggcacctgggtctttacctcggccacgctgtcggtcaatgacgatctgcaccactttaccgagcgcctcggcattgagcaggcggaatccctgcttctgccgagcccgttcgactatgagaaacaggcgctgctgtgcgtgccgcgcaatctgccgctgcctaaccagccgggcgcggcgcgccatctggcggccatgctgaagccgatgattgaggccaacaacgggcgctgctttatgctctgcacctcacacgccatgatgcgcgatctggccgagcagttccgcgccaccatgacgctaccggtgctgttgcagggggaaaccagcaaaggccagctgctccagcagtttgtcagcgccggtaatgccctgctggtggcgaccagcagcttctgggaaggggtggacgtgcgcggcgatacgctctcgctggtgattatcgataagctgccgttcacatcgccggacgatccgctcctgaaagcgcgcatggaggattgccgtctgcgcgggggcgatccgttcgacgacgtccagctgccggacgcggtcatcacgcttaaacagggggtagggcgactgatccgcgacgtcaccgaccgcggggtgctggtgatctgcgacaaccgcctggtgatgcgtccctacggcgccaccttcctcgccagcctgccgcccgcgccgcgcacgcgggatattaaacgcgcggtccgcttcctggcgaacccgacggcggagtaattcttcccggagtgtgttaagatgcgcgccattttgtgactgaccattgcgagagcgcgacgactgatgcgaattctggctattgataccgcgacagaggcctgttccgttgccctgtggaacgacggtacgacttttgctcatttcgaagagtgcccacgggaacacacccaacgtattctgcccctggtaaaaaccattttaaccgagggcaacaccgccctgactgacctcgacgcgctggcctacggccgtggtccgggcagctttacgggcgtacgtatcgggattggcattgcgcaggggctggcgctgggcgctgacctgccgatgatcggcgtctcaacgcttgcgaccatggctcagggcgcctggcgcatgaccggcgccacccgcgtgctggctgcgattgatgcccgcatgggggaagtctactgggcggagtacacccgtgacgaaaacggcgtctggcacggcgaagagacggaagcggtgcttaaacctgaagccgtcaccgggcgcctgaagcagctctccggtgagtgggcgacggtcggaaccggctggccggcatggcctgagatggcgaaggacaccggccttacgctggtggacggtaacatgctcctgcccgccgcagaagatatgctgccgattgcctgtcagctgcttgccgcaggaaaaaccgtggcggttgaacatgctgaaccggtttatttacgaaacaccgtcgcgtggaagaaacttcctggccgcgagtgaatctcagtaacaggaactgagaaaaaggagtcgcatcatggcggttcagactaaagttgtacgctttcttatggcaggcgcggttgccatagcactgagcgggtgcgtcaccgttcctgatgcgatcaagggcaccagcccgacgccacagcaggatctggtacgcgtgatgaatgccccggagttgtatgtcgggcaggaagcgcggtttggcggcaaggtggttgaagtgttaaaccagcaggggaaaacccggctggagattgccactgtcccgctggacgacggcgcgcggcctgttctgggtgaagcctcgcgcgggcggatctacgctgacgtcagcggcttcctcgatccggtagatttccgcgggcagctggtaaccgtcgtcgggccgattaccggttcggtggcggggaaaatcggcaatacgccatacaaatttatgaccatgcaggtgaacggctacaaacgctggcgtatcgcccagcaggtggtgatgccgccacagccaatcgatccgtggatgtggggaccgcatccgtatcgttacggctacggtggctggggttggtacaatccaggccctgcacaggttcaaacaatcgtaactgagtaacttactgttattgttaggaaagagacagcggctcagccgctgtctctgtttttttacggataaaacgaaaaaaaagagtgacgcgcttcgcaacctgcaatctgaacaattaataaactggtacgctgagttaatataatgttaacaaactgtttattatcggggctgtgatgacgacgaacactcatttcagaggtgatgcattgaaaaaggtttggcttaaccgttatcccgcggatgtccctgcggagatcaatcctgaccgttatcaatccctgattgaattatttgaacactcggtacggcgttacgctgaccagcctgcatttgtgaatatgggcgaagtgatgaccttccgtaagctggaagagcgcagccgggcgtttgcagcctatttacaggaagggttgggcttgcagaaaggggatcgcgtcgcgctgatgatgccaaacctgctgcaatacccggtggcgctgttcgggatcctcagggcagggatgatcgtggttaacgttaacccgctctataccccgcgcgagctggaacatcagttgaatgacagcggcgcggcggcgattgtgattgtctccaactttgcccacacgctggaaaaagtcgttgaaagaacccaggttaaacacgtcatcctgacgcgcatgggcgaccagctctctaccgcgaaaggtacgctggtcaactttgtcgttaaatacgttaagcggctggtgccgaaataccacctgccggatgccatctctttccgccgcgccctgcatgcgggctaccggatgcagtacgtgaagccggagatcgtgtccgaggatctggcatttctgcaatacacgggcggtaccaccggcgtggcgaaaggggcgatgctgacccaccgaaatatgctggcgaaccttgagcaggttaatgccacctacgggccgctgctgcacccgggcaaggagctggtgatcaccgcgcttccgctgtatcacatttttgcgctgaccatgaactgcctgctgtttattgagcttggcggtcaaaacgtattgatcaccaacccgcgcgacattccggggctggtcaaagagctggcgaaatacccgttcaccgccatgactggcgtgaacaccctgtttaacgcgctgcttaacaataaagagttccagcagctcgatttctccacgctgcacctctctgcgggtggcgggatgccagttcagcaggcggttgccgagcgctgggtgaaactcaccgggcaatatctgctggaaggctatggcctgacggagtgcgccccgctggtcagcgttaacccgcatgatatcgactatcacagcggcagtatcggtctgccggtcccgtcgacggaagcaaaactggtggatgatgaggataacgaagtgcctcacggtgagccaggagagctgtgcgtcagagggccgcaggtgatgctgggctactggcaacgtccggatgccacggatgagatcatcaaagacggctggctgcacacgggcgacatcgcggtgatggatgacgaaggcttcctgcgcatcgtcgatcgcaagaaagatatgatcctggtgtcagggttcaacgtctatccgaacgaaatcgaagacgtggtgatgcagcacagcggcgtgctggaagtggcggcggtgggcgttccttccggcagcagcggtgaagcggtgaagatatttgtggtcaagaaagatccttctcttaccgaggatgcgctgataacgttttgtcgccgtcagctgacgggctataaagtgccgaagctggtggaattccgggatgagctgccgaaatccaacgtcgggaagatattacgacgagaattacgtgacgaagcccgtgccaaagtggacaataaggcctgagcttcacgttaatcgcccagacgccggttaagccggcgtttttatgggcgcaaacaaaagagagtccgatttgaattaccagatgatcactaccaacgacgagctggcttcgctgtgcgaggtgacgcgtgaatttcccgctatcgccctggatacggaatttgtccgcacccgaacgtactatccgcagctgggtctgattcagatgtatgacggcaaacacgtgtcgttgattgaccccctcggcattaccgactgggcgccaatgcgcgagctgttgctggataccgccgtgaccaaatatctgcacgcgggcagtgaagatctggaagtctttctcaacacctttggcatcatgccgcagccgctgattgatacccagatcctcgcggcgttcagcggtcgtccgctctcctggggcttcgccgcgatggtggaagagtacaccggtctgacgctggataagagcgaatcgcgtaccgactggctcgcgcgtccgctgacggcgcgtcagcttgaatacgccgcggcagacgtcttttacctgctaccgattgccggccagctcatgaaagaggctgaggcgtccggttggctgtctgccgcactggacgagtgccgcatgacgcagcagcgtcgtcaggaagtggttgatccgaaagaagcctggcgtgacatcaccaacgcctggcagctgcgcacccgccagctggcctgtctgcaactgctggctgactggcgtctgcgtaaagcgcgtgagcgcgatctggcggttaacttcgtggtgcgtgaagaacacctgtgggcggtggcgcgctatatgccgggcagccttggtgaactggacagcattggcctttccggaagtgagatccgtttccacggtaaaacgctgctcgcgctggtagagaaagctcagcagctgccagaggacgcactgccagaaccgctgcttaacctgatggatatgccgggctaccgcaaggcgttcaaagatatcaaagcgctggtgcagacggtggcgggggaaagcaaactgagtgccgaactgctggcttcacgtcgtcagattaaccagctgctgaactggcactggaagttgaaaccgcaaaatggtttaccggaactggtcgccggatggcggggggaactgatggccgaacgcctgaataccctgctggaagggtattcgcgctaaagaattgtagccccggtaagcgcagcgccaccggggaaattgccgggcggcgcgatgcttacccggcctacaaaaccacaaacggattaacgcgactcttccgcttccggaagcgtcacgttcagctccagaatcgaaatatccccgtctttttgctccagctgaacggtgaccatttccgggtcaatctgcacgtatttgcagatcacttccagaatgtctttgcgcagctgcggcaggtagtgcggttcggcgtcgctacgacgacgttccgccacaatgatttgcagacgttcttttgcgatgttggcggtgctttttttccgcgagagaaaaaagtccagtaatgccataacttatcctccgaacaggcgtttgaggaaacctttcttctcttcttcaatgaagcggaaaggacgttcttctcccagcagacggtcaacggtatccgcatacgctttacctgcgtctgcctgtgtatccaggatcacgggctcgccctggttagaggcgcgcaacacggactgatcttccgggatcacgccaaccagtttgatgcgcaggatctccagcacgtcttccatgctcagcatgtcacctttgttcacccggcccgggttgtagcgggtcagcagcaggtgctctttgattggctcctggccattttccgcgcgacgggatttcgaggccagaatgccgagaatacggtcggagtcacgtactgacgagacttccgggttggtggtgatgatggcttcatccgcgaagtagagcgccatcaaagccccggtttcgataccggccggggagtcgcagaccacgaagtcgaactccatctttttcagatcgtcgagcaccttttccacgccttcgcgggtcagggcgtctttatcacgggtctgggacgccggaagaatgtagaggttctcggtacgcttatctttaatcagcgcctggttaagggtggcatcgccctgaatgacgttcacgaagtcatacaccacgcgacgctcgcaacccatgatcaggtccaggttacgcagaccgatatcgaagtcgattacgacggttttctttcccttctgggccaaaccagtagcgatggccgcgctggaggtggtcttgccaacgcctcctttacccgaagtcacaacaataatgcgtgccatagaaattccttgttaaaagggatcaatttaacggttgaacggtcaaagcgttatctgccagttgcagacgggccgctttgccataaaattcggctgggattttatcgctcagccaatattcacctgcgatagacaccagttctgccgtcaggtgagtacaaaaaatttgtgcttctcgatcgccgctggcgcccgcaagcgcacgcccacgcatcataccgtaaacgtgaatattgccatctgcaatcagttctgcgcccgcactgacgtggcttgtaacaatcagatcacagtttggcgcataaatgcgctgaccggaacgaaccggcagatcaatcaatcgcgtttttgtgactggggctacattttgcgccggaggcgggggagcgggaacggttgcaggcgttgcacgcggggctttttctttgccctcgtttaacaagggcaaacccgcgcgttcaatttcggcttttaactctgcgtctttgcagccgctaatacccacgatgcgcaaccccgtggagacgacggcctgctggagtcgcttccagttaaccggcccctcaaggtcgcttacattgacgacgacaggagcatgcttaagaaaagcgggagcctgcgcgattttgtcttctaacgcctgacgaataacctcgggttttgcatcatgcaaatgaaccactgataaggtgaagctactgcctttaagctcgatgggcgtatttgacatcctggccttactcaatttgctattaaccgcaacacatcgccgcgatattccgaagagtatcaggcatgttatagtcaggagtatattgaggcaagcaaccacccgttaattcagagtaaaaacatgttttgtgtgatctacagaagtaccagccgcgaccagacctacctttatgtcgaaaagaaagacgatttttcccgcgtgcctgaagaattaatgaaaagctttggccgaccgcagctggcgatgctgctgccgctggacggccgtaagaagctggtgaacgccgatcttgagaaagtcaaaaaggcgttaatcgagcagggctattatttacagcttccgccgccaccggagaatttattaaaacagcaccttgagctgagcggaaagaaataagcccgggtccttccgggaacaactcatcaaccgattaggggtcgaccatgtatcaacatcataactggcaaggtgcattactggattatcccgtcagcaaagtggtctgcgtgggcagcaactatgcaaaacatattcaggagatgggcagcgccgtgccggaagagccggttctgtttattaagccagaaaccgcactgtgcgatattcgccagccgctggttctgccgcagggactaggctcggtgcaccatgaagtggagctggcggtgctgatcggcgcgacgctgcgccaggcaaccgaagagcatgtagagaaagcgattgcgggttacggtgtcgcgctcgacctcacgctgcgcgacgtccagggcaaaatgaagaaagcggggcagccgtgggaaaaagccaagggttttgataattcatgcccgatttccggtttcgttccggtgagtgaatttaccgacgatccgcagaacacgcccctcagcctgaaggtcaatggcgagatccgccagcagggaacgaccgctgacatgatccataagatcgttccgctgattgcctacatgagccgtttcttcaccctgaagcccggcgacgtcatcctcaccggcaccccggaaggtgtggggccgctgcacagtggcgacgagctggacgtcagttttaacggcctgtcgctgaaaacccgcgtactgtaaaagcaccttgccgcctgaaaagggcggcaaaacttgcatcaacgtgccagactcgttataaggtgcgctctattttgacgtgtggacatcccgatgaacgacattcctttctggcaaagcaaaactctcgacgacatgaccgacgcggagtgggaatcgttgtgtgacggctgcgggcagtgctgcctgcataagctgatggatgaagattcggacgagatctatttcaccaacgtagcctgcaagcagttaaacatcaaaacctgccagtgccgcaactatgagcgccgtttcgaatatgagccggactgcatcaagttaacccgtgaaaatctgccgacctttgagtggctgccgcatacctgcgcgtatcgcctgctggcggaaggaaaagatctgcccacatggcatccgctgttgacggggtcgaaagcggcgatgcacggtgaacgtatttccgtgcgccacattgcggtgaaagagtccgaggtgcgcgactgggaagaccacattatgaatcaccctaatcggtgacaatnnnnnnnnnnnnnnnnnnnnnnnnnnnnnnnnnnnnnnnnnnnnnnnnnnnnnnnnnnnnnnnnnnnnnnnnnnnnnnnnnnnnnnnnnnnnnnnnnnnnnnnnnnnnnnnnnnnnnnnnnnnnnnnnnnnnnnnnnnnnnnnnnnnnnnnnnnnnnnnnnnnnnnnnnnnnnnnnnnnnnnnnnnnnnnnnnnnnnnnnnnnnnnnnnnnnnnnnnnnnnnnnnnnnnnnnnnnnnnnnnnnnnnnnnnnnnnnnnnnnnnnnnnnnnnnnnnnnnnnnnnnnnnnnnnnnnnnnnnnnnnnnnnnnnnnnnnnnnnnnnnnnnnnnnnnnnnnnnnnnnnnnnnnnnnnnnnnnnnnnnnnnnnnnnnnnnnnnnnnnnnnnnnnnnnnnnnnnnnnnnnnnnnnnnnnnnnnnnnnnnnnnnnnnnnnnnnnnnnnnnnnnnnnnnnnnnnnnnnnnnnnnnnnnnnnnnnnnnnnnnnnnnnnnnnnnnnnnnnnnnnnnnnnnnnnnnnnnnnnnnnnnnnnnnnnnnnnnnnnnnnnnnnnnctccagcgtcagaaattcccactggcgtacagagcagtcaccggaggccacaaacacctgcggcagccatttatccagcggcagccagctcgggaagcgggcggcaaaatcgcaggtcataaacggcgacgggtgaagctgcatctgggtgtgctcccaggcaagcgcaatccctttcccggcgctgtatagccagatggcaattgccgcatagcgtaacggtgatttgggtgcaatcgcacctaccagacccgcgcccataatgccgaacagagcacaacgctcataaatacacagtacgcaaggtttcagccccatcacatgctgaaaccacagcgcgaccatttccagcgcaaaggcggtcagggccatcaacaaccacgctccgcgaccgcgtgagcactggttcaaaaatcgcaacataatcatttccctggaacatgcttagacagcgcagtgtaaacgaattttaatgcgccgcaagtatacctgcttgcaataaccattgcgtacagggaacgagagtaattttgatgcacagcaaaccaaccagggtaagcaccagcgtatacggcagcgccatccagaccattcttccataagaaagtcgtatgagtggtgccagcgccgaggtcagcaggaagaggaatgccgcctgaccgttcggggttgccacggaggggaggttggttccggtgttgatcgccaccgccagcagctcgaactgttcactgctgacaatcccttgctccatcgcggctttggcctcattgatgtataccgtcccgacaaagacgttatcggatatagaggacaacagaccgttaaacaaatagaacagcgtcagctgcgaatctggcgtagcctgaagcacaaacgcgatgatcggcgcgaacagatgttggtcaataatcaccgccacgaccgcgaaaaacaccgccagcagggcggtaaacggcagcgcttcggtaaaggcttttccgatagcatgttcgtccgtaacgccgcccaggctggttgcaaggataattaccgacaggccaatcagccccacctcggcaaggtggaaggccagcgcagcgataagccacacgccgatgaatccctgtgcaatcaggcgcagcgtctcctggcgcgtacgctgtttgcggctctgctcgtcaaacttatgcagctcctggcggacctgatcgggcagcttcgcgccatagccaaagaggtggaatttttcgaccagcacacaggttgctaacccgcagaccagcacgggcacgctgaccggcgccatgcgcaggaaaaattcgccaaaatgccactcagccgctttggcgataatcaggttttgcggctccccgaccatggtcatcacgccgcccagcgccgtccccacgcccgcatgcatcatcaggctgcgcagaaacgcgcggaactgttccagcacatcgcggttgtgcgcctcaacgtggctgtcgtcctgcaagttatcgccaggacgagacgaggccacccggtggtaaatcccgtaaaagccgacggcgacgctgatcaccaccgccacgaccgtcagcgcatccaggaaggcagagaggaaggccgcggcgaggcaaaacgccagcgagagcagcgttttcgacggaatgctcagcagcaaacgggtgaagataaacagcagaagctgcttcataaagtagatccccgccaccatgaagatcagcagcagcaggacttcaagattcgacgcaatctcgtttttaacatgctccgcgctggtcatgccaattaacacggcttccagcgccagcagtccgccgggcaacagcggatagcacttcagcgccatcgccagggtaaagataaactcggcgaccaacatccacccggcaacgaagggatccagcaaaaagataacgggattaacgaccaggaataccagtaaagtgagtttgtaccagtcaggtgactgacctaaaaagttgcgccacagcgcgcgcccaaatgaaatttccacgacagacgtcctttacccgtcaaataagacaagacatcagtatacgcaaaaatggcggcagagcgggggattaagccatttgtaaatttcataaaaatgaaacggcgatccctcttttctgtctctgctgcgctatctgcctctgcgcgcctctggtatgatgagtgcaatttgctaaagctgtgtaatggaaatctcactatggtcattaaggcgcagagcccggcgggtttcgcggaagagtacatcattgaaagcatctggaataatcgtttccctgcgggatcaattctacctgctgaacgcgaactctctgaactgattggcgtcacccgtaccacgctgcgagaagtgctccagcgtctggcgcgcgatggctggttgacgatacagcatggcaaacccactaaggtgaacaacttctgggaaacgtccgggctgaacattctggaaacgctggcgcgtctcgaccacgaaagcgtaccgcagctgattgataatctgctttccgtgcgcaccaacatcgccaccattttcatccgcaccgcgtttcgtcagcatcctgaagatgcgctgaaagtgcttgccaccgctaatgaggtggaagaccacgcggatgcctttgcgaccctggattacaatgtgttccgcggtctggcgtttgcttccggcaatccggtttacggtctgatcctgaatggaatgaaagggttatatacgcgcattggtcgtcactactttgctaaccctgaagcccgcagcctggcgctcggcttctaccataaactgagcaaactctgcaccgaagggctgcacgatcaggtctatgaaacggtgcgtcgttacggccacgactccggtgaaatctggcaccggatgcagaaaacgctgccgggtgatttagcgattcagagtcgctgaaataaaaaacctctcgattgagaggttttttttcgcccggtggcgctttgcttaccgggcctacaaaacccgtaggccgggtaaggcgtagccgccacccggcaacaaactacagcgtattcaaccgcgccggacaccggtccagcagctccacgctgccatcttcgttctgctgctccagcaacacgtcaaatccccacaggcgatgcacatgcttcagcacttccttacgccccttatccagcggcgcgcggttgtgcggaatatagcgcaacgtcagggagcggtcgccgcgcagatccacgttccagacctgaatgttcggttcaagattactcaggttgtactgggatgacaggcgcgagcggatctcgcgataaccctcttcgttgtggatcgcggagatctccaggtagttgttgcggtcatcatccagtacggtgaagaagcggaaatcacgcatgatcttcggcgacataaactggctgataaagctctcatccttaaaatcacgcatcgcgaagtgcagcgtttccagccagtcggaaccggcaatatccgggaaccagtatttgtcctcttcggtgggcgactgacaaatacgcttgatatcctggaacatggcaaagccgagcgcgtacgggttaatgccgctgtaccacgggctgttatatgccggctggaataccacgttggtgtggctgtgcagaaactccatcataaaccgctcggtgacttttccttcgtcgtacaggtggttaagaatggtgtagtgccagaaggtcgcccagccttcgttcatcacctgggtctgcttctgcggatagaaatactggctcaccttgcgcacgatgcgcaggatctcacgctgccacggctccagcagtggggcgtttttctccataaagtagagcaggttttcctgcggctcggaagggtagcgacgcgcctcggcgacggttttctcctcttcacgtttcggcagggtgcgccacagcatattcacctggctttgcagatactcctcgcggcttttctgccgggctttctcttcctgcaatgagatcttctgcgggcgcttatagcggtcaacgccgtagttcatcagcgcgtggcaggagtccagcagcttctccacctcgtccacgccgtagcgctcttcgcagtcggtaatgtatttgcgggcgaagatcaggtaatcgacgatggagctggcgtccgtccagctgcggaacagatagttatttttgaagaacgagttatgtccatagcaggcgtgcgccatcaccagcgcctgcatggtaatggtgttctcttccatcagataggcaatacacgggttagagttaatgacgatttcatacgccagtccctgctgcccgtgcttatacagccgctctgtctcaatgaattttttgccaaacgaccagtgcggatagttaattggcatcccgacgctggagtaagcgtccatcatctgttccgaggtgatgacttcaatctgatggggataggtatccagacgatagagtttggccacccggtcgatctccgccaggtagacatccagcaactcgaaggtccagtcgggtccatcgctcagacgggtgctgtccctggacatggaatctagtgtagccattagcgcgccctcgttgttggtcgctctctctgactggagagcctcctttcaagcatagatcaccccattcaaatacgcggggcgcagaaattttttctttgcgatttcgcgttttcgatacggcaaataaagcggtgctcacagaattttctactggttaaaaataacgcgcagcaggagatcccaaataagcgccatcccctgatacagcgggatatgtgagttgagtcaccataaaaaagtcatatgttgaataatattttcaactaggttatcaaactgtaattagatgattgttcttttgctcataatggagtggctatgcgtgttgtcatactgggaagtggtgtcgttggcgtaaccagcgcctggtatttaagtcaggcgggacatgaggttaccgttatcgatcgcgaatccggtccggcgctggaaaccagtgcggcgaatgcggggcaaatctctccgggctacgctgcgccgtgggcggccccgggcgttccgctgaaggcgatcaaatggatgtttcagcgacatgcgccgctggcgataagtcttgacggcacgcagttccagcttaagtggatgtggcagatgctgcgcaactgcgacacccgccactatatggaaaacaaaggtcgcatggtgcgtctggcggaatacagccgcgactgcctgaaggcgctgcgtgcctcaacgggcattgaatatgaagggcgtcagggcggcacgcttcagctgttccgtaccgcgcaacagtacgaaaacgcgacccgcgatatcgccgtgcttgaagatgctggcgtaccgtatcagctgctggaagccagccagctggcgcaggtggagccagcgcttgccgaggtcgcgcacaagctgacgggcggtctgcgtttaccgaacgatgaaaccggcgactgccagcttttcacccagcgtctggcgcgcatgtgtgagcaggccggggtgaaattccgcttcaatacttctgtcgacaaactgctgtcggaaggggagaagatttacggcgtgaagtgtggggaagaggtaattaaagccgatgcctacgtgatggcgtttggctcctactcaaccgcgatgctgaaaggcatcctggatatcccggtctatccgctgaaaggctactccctgaccattcctgtgaaagaggacagcggcgcgccggtctcgaccattcttgatgaaacctacaaaatcgccatcacccgcttcgataaccggatccgcgtcgggggcatggcggaaatcgtgggcttcaataccgagctgctcaaaccgcgtcgtgaaacgctggagatggtcgtgggcgatctcttcccgcgcggcggcttcattgagcaggcgacgttctggaccggcctgcgcccaatgaccccggacggcacgccgattgtgggccgtacaccatacaaaaatctgtggactaacaccggccacggcacgcttggctggaccatggcctgcggttcgggccagctgctgagcgacctgatctccggaaggacgccggcaattccgtttgacgatttgagcgccgcacgctatcaatcagggtttaccccatcgcgtccacaacacctgcacggcgcgcataattaaggagtcgtcatgtcccgtcccattctggcccagctggatttgcaggcgctgaaggataacctgcaaattgttcgccgtgctgcgccgggttctcgtgtctggtcggtggtgaaagccaacgcctacggtcatggtatcgaccgtatctggagtgcgctcggcggcaccgatggttttgccttgctgaatctggaagaggccatcctgctgcgcgagcgcggctggaaaggaccgatcctgctgctggaaggattctttcatgcgcaggatctgcctctgctggataagtaccgcctgacgaccagcgttcacagtaactggcagatcaaggccatccaggacgcgaagctgcatgccccgctggatctctatctcaaagtgaacagcgggatgaaccgtctgggcttccagcctgaacgggtgcatacggtctggcagcagcttcgtgcgctgaaaaacgtcggtgagatgacgctgatggcgcacttcgccgatgcggaaaagccggacggcattgccgatgccatggtccgcattgagcaggcggcagaaggtctggactgtccgcgctcgctgtcgaactcagcggcaacgctctggcatcccgaggcgcactacaactgggtacgtccagggatcgttttgtacggcgcgtcaccctcaggtcagtggcaggatattgccaacagcggcctgaagccggtgatgacgttacgaagcgagattatcggcgtgcaaacccttaaagcgggcgatacggtgggctatggcagccgctatcgggcagcaggtgaacagcgcatcggtatcgtggcggggggctatgcagatggttatccgcgcatcgccccgagcggcacgccggtgtgggtcgatggcgtgcgcaccggcacggtaggtaccgtctccatggacatgctggccatcgatttgacgccgtgtccccaggcgggcatcggatcgccggttgagctgtggggcaacgaggttaaaattgatgatgtggccgctgcggcgggcaccgtcgggtatgaactgatgtgcgctctggcgccaagagtgcctgttgtgacggtgtaacttgtgtgtgccgggtggcgctagcgcttacccggcctacgttcggggttttgtaggccgggtaaggcgaagccgccacccggcaaaaaagcagctactccgcctcctcctccatcggccttacgccgactttgcgcaccgcgttatcttctttctccgctaccgtccagatcatcccggcaaactccacctggtcaccgacgaccggcgcagcccctaataattgctgaataatctcacccagggtttgctggttatcgcgattctccagtccaccttccaggccataaatcagcgccacatccgcaaagcgggcgctggcttcgaggataaaatcgccgaagaaacgctgatccagcgccaccgggggcgactggctgaacagcttgccgagggccggcaggtcgcgctcgcggccaatcacgcagaggatatcgttctcacgcagccgcgtgctgccggtcgggtgaagcagggcgttatcccggaacagggcggcaatgcgcgtttcagcgggcatatgcagatcgcgcagggacgcgcccacgcaccacttatcggcgcttagctggtagacaaactgttcccagggattctcagggtgaatatccagccccacgcgggagaccggccagccaatgggcggtaccaccactttggcttttttcgccgcccagcccagcgacgtcccctggaacagcagcgacaccagcaccacgaagaaggcgacgttgaagaacagacgggcgttgtccagcccggccatcatcgggaacacggccagaataatcggcaccgcgccgcgcagccccacccaactgataaatatccgctcacgcaggttaaacccgcggaacggcagcagcccggcaaacaccgacagcggacgggcgaagaagatcatccaggccgacaaaagcagcgccggtacggcgataggcagcaggtccgacggcgtcaccagcaggcccagcaccaggaacatggcaatctgcgccagccaggccaggccgtcgaagttctgcaaaatggcgtgacggttgcgaatcggtcggttgcccaacaggaaaccgcaaaggtaaaccgccagaataccgctgccgtccagcgcggtggtgacggcaaagatcaggatcccaccgctcagggccagcagcgggtaaaggccggaaggcagcgtaatacggttgatcgtctgctgtaacaggtaaccgccgccgagaccaatgataatcccgaggccaaactgctggaggatgtgccaggcgaacatccagctcaggccggtttcgtgctgctggatcatctcaatcagggtgatggtcaggaacaccgccatcggatcgttactgccggattcaatctcaagcgtggagccaacgcgttcgttcagccccttgccgccgagcagtgagaaaaccgccgccgcatcggtagagccgacaatcgcgccaatcagcaggccttccattatatcgaggttaaacagccaggccgccatcatgccggtcaggccggaggtgatcagcacgccgacggtcgccagagacagcgccgggcctaaggcaacgcgaaacgaacttgcctgggtgcgcattccgccgtccagcagaatcaccgccagcgcgaggttactcaccatataggcgaaagggtaattatcgaaggggataccgccgataccgtcgatcccggcaagcatgccgatagccaggaaaatgacaagaataggtatgccaagacgcgatgaaaatgaacttaataaaatgctaaaggttaccaggatggaacccagaatgaagagactgattatcgctgtggcacccaatgtcgtcttactcccacctcaatgtgaacgctgttattaaaaccctaacataataacaacgttaactgcgttttattgagggggaataacggcttttttatgcctttaagaccggatgaccgctgattgttaaccgactgcctgaattatcgtgtacaaggtgcgcctgggcacccagcggcagggtaacggtttgctgctcatggccgaaatccagaccggcgatcaccgggatatccagccgggaacgaatgaaatcaatcatcgtctccagggaatagcccgcatcgtaatcgttgggggctgaaccactaaaactgcccagcacaatggccgactgccgatccaggatcccggcgtgatacagctgcaacagcatacgttcgacgcggaacgggtgttcgttgatatcttccagcaccagtatgccgtccgtgatctgcggcagccacggcgttccaatcagcgacaccagcatcgcgaggttgccgccccacagctgtccttcacattcccagtgcggtccattgccttgccactcgatggtgaacgtcgggttttgcagggcgcgccagaaatggtcctgcgtaaacgcatccagctccggcgcaccaaagttgccggccagcatcgggccgctaaaggtaatgacgttatgcaacgcaagcaggccgagctggatcgccgtgaaatcgctgtgtccgcagattaacagcggatcctgctgctggcgcgcggccagcccggcccagtcgacgctctccagcagccggcttgcgccatagccgccgcgcacggccagcacaatagtgttttcaccttccagcgtcgccaggttgttgatatcactcagtctctgcgcctcggtaccggcaaaacgctgcatgcggcgggggataattgtctgattttttacctgatggcccatttccagcaggcgctgaacgccccgctgtgccgcctcctggttgatgcagtagcctgacggtgcgatgagatgaaactgaggcatggcaattccttgctgaatgagaatctaattgtctatatcatgccgcttatacgccgcctgcttcaaggggcgacgtaccgcgatgaccggctataaggatagatgacgtgaaattgagatggtttgcttttttgattgtgctgctcgctggctgtagttcaaaacatgattatcaaaatcccccctggaaccctgaagtgccggtaaagcgggccatgcagtggatgccgatcagcgaacaagccgggaaggcctggggcgtgagcccgcgtctgatcacggcgatcattgccgtggagtccggcggcaacccgacgctggtgagtaaatcgaatgcggtggggctgatgcagttaaaagcctcgacggcgggaagagaggtctatcgctacatgggctggaagggacagccatccaccagcgagctgaaaaacccggaacgtaatatctctatgggaaccgcttacctgagcattctcgagcatggcattctgaaggggattgacgatccggaagtgatgcaatatgcgctggtggtgtcgtacgttaacggagccggcgcgctgctccgaaccttctcatccgatcgcaaagaggcgatagaagagattaacgatatggataaagatgaattcttcgagcacgtggtgaagaatcatccgtcagcacaggctccacgttatatctggaaagtacagaaagcgatggacgccatgtaacgcctttgtcgggcggcagtatgctgcccgacgcctttcagcgcactttgttcgcgcgttcccgcgcttcacgctccagtgagaagatgatgcgctgtagttcgcgttcggcgcctggcccgacattcagaaagcgaaagctcagtcgcggcgtggtaatggtttcgtttttgtctgttccaccaccttaccgctcgctgatggnnnnnnnnnnnnnnnnnnnnnnnnnnnnnnnnnnnnnnnnnnnnnnnnnnnnnnnnnnnnnnnnnnnnnnnnnnnnnnnnnnnnnnnnnnnnnnnnnnnnnnnnnnnnnnnnnnnnnnnnnnnnnnnnnnnnnnnnnnnnnnnnnnnnnnnnnnnnnnnnnnnnnnnnnnnnnnnnnnnnnnnnnnnnnnnnnnnnnnnnnnnnnnnnnnnnnnnnnnnnnnnnnnnnnnnnnnnnnnnnnnnnnnnnnnnnnnnnnnnnnnnnnnnnnnnnnnnnnnnnnnnnnnnnnnnnnnnnnnnnnnnnnnnnnnnnnnnnnnnnnnnnnnnnnnnnnnnnnnnnnnnnnnnnnnnnnnnnnnnnnnnnnnnnnnnnnnnnnnnnnnnnnnnnnnnnnnnnnnnnnnnnnnnnnnnnnnnnnnnnnnnnnnnnnnnnnnnnnnnnnnnnnnnnnnnnnnnnnnnnnnnnnnnnnnnntccggcatttttgccttacagaaataggccgggtgaagcggggcgctgatgcgaaaaaactcgcggcgttgcacgaaccagaggttagcgggcaggggagcgataaacgcaggcaaaccctggtacgcgatcgtggtcaggcggggcagtataaactcgactttagccccctgcgtttcggccatcaccgagaggttttctgcctggagcgcggcacggttttcttcgctctggctacccagatccacgatcaggtgttctgccgtcacgtccaggatcttgctgataaactggctggttgaccagttgatgcgcagcggcacctcgccctttttcaggtcgcgtaacacccctaatacagccagcggattttgtttcaggaactgctcactgtagctactcacgccagatggctcctcgatagatgacagactgtctctgggttatcggcacgctggcatgaaacttaatacaaacgatctgtttttctccgccgatattgatttgctaatggaaatgataataattggcgttcccaatagcatctaataacaagacgacactatgagcacctcacgttttgcgttatgcgcgttggcaggcgccgtcacgctggcattgcaaacacaggcttttgcagaagaacccaccatcgtggtgaccggtacagagcagggcagcgcgctccctgcctggaccaacagcgccacgaaatcagccgtcgcggaaagtaaacgccccaggtgatcaacaccatcgccgctaaagagattgagcagcggcacgccagttcggtaaacgagatcctgcgctatgcgccgggcgtttccacggaggtgcgcgggagcacctcttacatgagcgagtacaaaatccgcgggttcaacgtcgagcaggagttctataacggcctgcaacttccctataacgtcaccgggaacactaaagcgcgaatcgatccgctgctgattgagagcgtcgatatcctgaaggggccgtcatccgtgctgtatggcggtggctccccgggcgggctggtcaatattcagagtaaaaagccgcagaaagaggcgaaaacagaactgggctttaacaccggaaaccgcaatctgaaagaggggtacctggattccacggggcagattgcgaccagcgactggaactatcgcctgctgggtaaagcgacagagagtgacgaacaggcgcacaccacgcgctatgaaaactatctggtggccccctccgtgacctggcagccggatgacaaaacgcgcctgaccattgacgcgctggcgcaaaatacgccgagcctgacgccgtctgatccgatgccgctaagctatctacggtctaaatacgccgatcgtcgtgactatgccggggatgagtggagcggctttaagcagcgtcagtggatgctgggctacagctttgaacatgagtttgacagtggctggggctttagccagaaagcgcgctactttgacgtggacacccaccagcgcagcgcctattcaaccgggacgggcagcgaggtctaccagcttaaccgcttcgcctataccacggatgaagatttacagagcttcaacattgataaccaggtcacccgaaccgtcgcgctgggggactggaaacatcacctgctgacgggctttgactaccagaagctgaactctcacttccattatcgttacgcctcgtccacaccgggtatcgatatgcgtaatccggatcactcgcagatcgataacgatgcgctggggcttgaaaccgcgcagaaaaaccgtctcagctatcagcagaatggctattacctccaggatcagattgcgtttggcgggctgaacgtgctggccagcctgcgctatgacgactaccgttctgtcaccaccaactatctgcaaaacggtgacaaagcctgggtatcgcaggatcgcctcactaagcgactgggcgcgctttatgccttcgacaatggtctctcgccgtttatcagctattcggaagggttcgccccggtatcgccgcagggcacgctgaccgcgaaagacgttaagcccaccaccagcaagcaggtggagggtggggtgaaatacctgctggcggattacgcaaccaccttcaccgcctcggtgtttaacattcgtcagaaaaatgtggtgaccagcgatccgggcttcctcaactatcgccagaccggggaagtggaatcgaaaggtgcggagctttccgctatgagtcgtccaacggataacctgacgctgattgccaactatgcctacacccacgccatcaataccgaagatgacaagtaccagggcaaacgaccgacgcaggtccctgagaacgcctttaatctgtggggagattacacctttgacagcatgccgctgagagggttaacgctgggggcaggggcacgctacaccgggccgatggagatctcgccagccaacgacgcaggcaagctgggcggtacgacgcaatacgatctggcggcgtcttaccgcatgggcgagctggcgccatcgctggaggggctgacgttgaaagcgagcgcgcagaacgtcaccaacaaagagacgctcacctgctatgacgcgaccaactgctggataggccgcgaccgcacgttccaggtcggggcgagttacagcttctgaaaaaagcccggtggcgcttcgctaccgggccaatctattgcacggaaccatcccctcgccccaccggggagagggtcagggtgaggggcgctactgcgccgcctgtttcgcaggtgcaacatcatcgtttgccgcaggctgattctccggtacgctgtcgcacggcttctctttcggacagaccatgtccagcatcctgagcgtcacgccgttactccagccgaaaccgtcctgcaacggatactcaccgccgccaccgccggtaccggtcgaagagacatcgtacttctcaaccagtttcttctcgcgatcgtaggtatgctgaacgtttttcaggaaacgccaggttacgtccatcgccactttctgctgaccatagttctgcaacccttccaccgctacccactgcaacggcgcccagccgttcggcgcatcccactgctgcccgctgttgatggtggtggtagaaataccgcccggtttcagcaggcgtgacgacgcggctgcggccactttatcggcgcgatcctgtgatgcggccttcacatacagcgggaagagggctgcggccgtcagctgattacgcaccttcccggttttcagatcgtaatccgcataccagccctctttatcgttccacaggtggctttccatggctttctgacgtgcggaggccagcgcgtcatatttacttgcactggcgttatcgccgtcttcctgactggcgcgggccagcagtttttccatcttaaacatcagcgcattcagatccaccggcacgatgctggtggtgcggatggtacccagcttctgtggatcgtccatccagcgggagctgaaatcccagcccgaggccgcggcagagcgcagatcgcggtaaatctcggtggccggacggttagggttatttttggcggtggtcacgtcatccagccacgactcagggcgcggcgtgtcccgatcgtcccagtagcggttgaggatcgagccgtcatccagcttcaccacgcgtttgttcgcctgaccaggctggagcccatcagccccctccatccagtaagcgtactctttctccatctgcggacggtatttcttcaacgcgtcgctgtcatgcgtgtccagcaattccaccatcagcgagaagaacggcggctgagagcggctcaggtagtagctgcggttaccgttagggatatggccccaggtatcaagctcgtaagcgaagttgtccaccatgtcaccgatcttatcccagtggccgctctcggccagccccagcatggtgaaatagctgtcccagtaatagacttcgcggaagcgtcctcccggcacgacatagggctttggcaggggcaggagggagtcccatttgttcgctttgtcagtggtgcgggtcagtacaggccacagatcgtctatgtgttcgcgcaggctctggccttcagggggaacgtatttctcaccttccttcggcaggataaagttcatctctacgaagtggcgcaggtcaaaaccggactgggtatgctgcatccggtaatccgccaggatggttagcgggtcgcttttgggaacggcatccgcgaaggttttctgatccgggaacagtttggcgctctgtacttcattaaagagggggccaaggagaatatcaggtgagctttgctggctcgttggctggtcttcagcataaccaaatgcggtaacaccgagtagggcgcctgccaacgtaaggtgtaacaagccagggcgtagcattcgagtttttatcatcggttcatctccattcgtcgctgggcagcgtcaccgctgtcgtcaatcacctgaaaaccttagacgaatattgcccgcttcgcgtgttagatatcccattttgcgcattaccagacaatttaccgccgcgcccggacgtgagaagcgcgccgaaaactatttactcggggaatgttttttggggaatgattttaattaaatatcctgtcagggcacactatgaatattgaccaggcttatgggttgcaaccttttttaattctgtgaacggggttgtgtttctttattacattccgcgaataactttccgtgaaggtcacacaaagtaaaaaacataaccgacataacaaaaaacataatagcctgccgaaaaacatttagacgaaatagagtggcccatcacttcgggtattcacttttatttcaggatggattctatgcaattaaaaaaaatggttgtcctcgtgggggcactctgttctggctctctttttgcggcacaaagcgcgacgagcgtagatgaaaaactggcgcaactggaggcgcaaatcgaggcgttgaaacaacagcaggcggccagtcagcaggctgctcccttggtcgtccagtcagaagagcccgtcaataaagacgcaccaccgaagctgacgctttcgggctttggagatataaaattttatggcgatgtggaatttaatatggatgctgccagcaaaaccggcagtctgacttctgttaagcaaagtgctaatagcgactgggcgccgggagataaagaacggtgggatattaatggtcgtattttgctggggtttgatggttatcgacaaatggataacggccatttttccggattttctgtacaaccactgggcgatttggcagggcaaatgtaccttgatgatgcggtatttttctttggcgcagaaaacgactgggaaattaaagttggacgttttgaagcctacgatatgttcccgctcaaccaggatacctttgttgaatactcaggcaatacagcggacgatctttatagcgacggctatggttacatttatatgctgaaagaggggcgtggccgtaccgacagcggcggtaacttcctgatgagtaaaacgctggataactggtatttcgagctgaatacgctgttcaaagacggcagcgatctgtacgtcgaccagcgctaccatggcgcggaactggaaaatgataagaacgtcgcctatgtccggccagttatttcgtggcaggacggcccgttctcaacggccgtcgccatggaaaccaatctggtcaacaatgcttatggctatcgggatgacgcgggtcgttgggtcgatcagtctgaccgcaccggttacggattcacgatgacctgggatggtctgaaagccgatccagaggatggcatagtcgtgaatctcaacacagcgtatcttgacgccgcagacgaaacggacttcacctccggcgtcaatgccctgtggcgtaacgctgagctgggctatatttatgcgcataacgaaatcgacgaatttaacacttcaacctttgacacagagtgtgagaatgattgctggatcaccgatccgggtgagtatgatattcacactgtccatgcgtcgtaccttattcccaacgtaatgaagatgaagaactttaacatttacctgggcgcctacgcttcgtgggtgaacgcgtcgccgaaaaagggaagcgataagaacgacgatcgttatggcggtcgtgtgcggtttaaatattatttctgaagagtgtcatgatgcccctctgttagcaggcagaggggccattttgcaggccgggtatgcgcaagcgtcacccggcaatacgatcggctacaaccctttcttatccatcagcaccgccagatccaccagacggttcgagaagccccactcgttgtcataccacgacaggatcttcaccatattcccgccaatcaccagcgttgaaagcccgtcgatgatggatgagcgcgggtcgccctgataatcacgggagaccagcggttcatcgctgtagcccaggatgcctttcagcggcccgctggcggcagcctgacggaacgcgtcattcacctcttcggcggtcacgttgcggctcagcgtcaccgtcagatcgacaatcgacaccaccggaaccggcacgcgcagagaatacccggtgagtttaccgtcaagctcggggatcactttcccgagcgcttttgccgcgccgctggagtaaggcacaatggataatgctgccgcgcgcgcgccgcgcagatctttttccggctggtcatgcagcgcctggctgttggtgtaggcatgcgtggtgttcatcagcccgtgctcaatgccaaactgctggtgcagcacctgcgccgctggcgccagaccattagtggtgcaactcccgttgctgaccacaaaatgctgggccggatcgtacagcgtgtggttcacgcccatcaccaccgtcagatcatcatttttagccggggcggaaataatgacgcgttttgcgccgccgctcgtgatatgcaccgccgctttttcacgttcggtgaagaagccggttgcttcaattaccacctcaacgcctgcgtctttccacgcaatgtttgccgggtcgcgttcactgaatacggtgatgcgttgcccgtcaacctgtagcgcgccgtccgccgcttccacaggcaccggcagcgtgccgagcagagagtcatatttcagcagatgggcgagggttttactgtccgtcagatcgttaatggccacaatctggagatccgggttgcccagcgccgcgcgcaggacattacgtccgatacggccgaaaccgttaataccgaccttaaccatgatgcactccttatctgtgttgtctggagttactgtaggcgtcaggtcaggtggcgtaaatgacaaaaaaggatcatattacgccattctgcggcagtggaagcgctggcggtattcgcccggcgtgagatgaagctgcttttcaaaaacgcggcgcaggttgatgctggtaccaaacccgcttttttcggcaatgacctcaagcggatcctgggtctgctccagaagctgtcgggcggcggccagacgcgcttcggtgacataacgggccggaggcacgcccacgtcacgcgtgaacacgcgggtgaaattgcgcgggctcatggcgacccgttcggccagcctttcgacgcacaaatctgcggtgaggttttgcaggatccagctttgcagttcgctgactggtccggtcgcgccggactgctccagattatagcggctgaactgtagctggccgccaggccgacgcaggtacatcaccatatcctgcgccacattgcgggcgagggtgaagccgtaatcatcctccaccagcgccagcgtcaggtcaaacccggagctgacgccgccggacgtccagacggggccatcctgaacatagagcgggccgccctcaacgttgaccgcaggatagcgggttttcagggtttccagaagccgccagtgggtcgttgcccggcgcccatcgagcagtccggcctgtgccagcagcagggccccgccgcagacagaggcgacgcgtcgcgcatgcggcgcggccaggtgcagccagtccaccacggcggtgctctccagctcattcatgccgcggccggtaatgatgatcgtgtccagcggctcgcgcggatccagctccggcaggcgatagtccgccagcaggttcaaaccggactggccatggatcaccagatgaggctgggtggtggcgataatgatgcggtagcggggctgcgcaaggccgtccgggtgcagccggttggcctgcatcagaatgtcggcgataccggcggcctcaaacaacatgccaccatcaggaacgataatcaggatcttcttcatgtcctgaaaagtacctttatcacaaaataagtcaagcggaaggcgaacattgtagaagagacaaatgaggcgtgccgggtgaaagagtagaacggcagatgttgggaagaagtaaaagaaatatgtagtaacggtaaaacttcttgcgtgagattcactgtcagcgccgctgaacccccagtttatgggctgcaagggagcgcgctgaacgatgagagagcaaaaagatgtagccgggcttaattgtttaggtgcaaaaaataaccccaaaggggaattttgctcaggttatttcggatcgcgaaattaaatttctgccattttcttagccgccatttgtttatgcgggacgctcgtgcacaataaaagttatcttctgaatgcaacaatgaaaatatcccagatatatcccgcagcgcacagaaaaaatgaaattctactaattatggtagtggagataataaggggttacgttaatgatagtggttctctttttcctgtttagccattaattttcatagagttatgctcgaaatctgtctaagaaaaagacgattttacctaagtgcgcattttttatgagattaatcctataatgcattgggcgtatcattaaacgccattaagcaggtgggaaatattgaattgatgacaagctcatgtaaacttgtctaccgtttgtcaaaatatgtcaggagcatgctgggcccatttctgtcgggttcgtgcggtagctatgccttaaaatagttacctgctgaaaatattccgactattttaacaatagcacttaagtcaaattttatcccctctcttcatcctctaaatatcgctacggaaaagcatatgaaactgcgcgtattgttatcacttctgtttgttatggcggtggcgggctgtaaggcgccgcagaaaccagcgatcaccgatgatacgattgtgaccagccaggtgaatggcatcacgctgacgcaccgtcacgctgttacccctccggcggagttcactcaggtgaatgaaccgtaccgtgccatgtacccggcatccctgatgagccgtcctgactacggcggaaaagtgatccgtacgcttgagaccggtaaaacttacgtcgtgctggggcaggttgaacatttctggatggcgctggccgatgaagggagtgaacagctgattggttatgtgccgatgcgtgccgtaatcaaggctgaccagtacgaagccaccgtgcgtaaacaggcactgcgcccgaaagcgcgcaagaaaaccacctgtgttgatgtcgatggcaacagcaaagcctgcaaagacagcgcgaacggtacctggatcctgaactaaacgggtttcacgagcatatttttatgaataataaaaattttcatcggatgtggttccctttttttgcgttgattttcgcgctgatcggtggttgtacgtcgtcttcacacagcgacccctcccgctacaatcttcagtttcaggctcatcctcaaatcaatgattctgcgccgcttaaggtcagagtgttgctgctgaaatccgatgcggatttcatgtccagtgacttctactccttacagaacaacgcgtcagccacgcttggcgcgaatctgctgaacagcgatgtgttcttcctgatgccgggccagctttcgaaaaccctgagcggacaaagctcaccggaagcgcgctatatcggcgtgatggcggaataccaggcgctggacggcaaaaaatggcgcgtctcacttcctttgcctgttcccggcgaaaacgcgatttaccagttctggaaatggtccgcagatgaactccaggccagcgtctttcttgacgtaaatggtatccgggtcatcagccagtaacgcccttcataacaggaaagagatcatcatgacgaaagcagaaaaggtcgtctggaccgagggcatgttcctgcgtccccaccattttcagcggacagaaagctacctcctcaaccacgttcgtgagtggggggccttgcagcgatcgtatctttggggctttctcgaccttgagctggatgaagcgatgcttcgccagggctgtattgccctgagctactgtagcggtttgctgcctgacggcacctttttccaggttcgcagcgaccgcaacggtccggctccgctaaaaatccccgataatctgaccaatgaaaaggtggtgcttgcgctgccggttcgtcgcggtggccgtgaagaggtgattttcagcgaggagcagtcttctctggcgcgttttattacctttgaacaagaggtggaagacgacaacgccatgtcggtcggggaggcgacggtccagtttggccgcctgcgtctgaccctgatgctggagaaagatctgacggcagaatggaccgccatcggcgtggcgtacgtcaccgaaaagcgcaacgacaaccacgtgcggctggataacagctacattccgccaatgctgaacgccaataacagcccgcagctgtacggcatgatcaatgacctgcacggcttgctggtgcagcgtagccagcagatcggcggtcgactgcgccagccggggcgtttcaatacgtctgaaatggttgagttcacgcttctctcgctgatcaaccgccaccttggcgacgtctcacatttaaaaacgctgccgctgcttcacccggaagcgctctggcgcagctggctgccgttcgccacggagctcgccacctggacgccgcagcgtaccgcagagagcatactgccggtatacgaccatgacgatctcgccgtttgcttcagcaaactgatgctgatgctgcgtcaggggctgtcgctggtcatggaagatcatgccatccagctgccgctgcacgaacgctcccacgggctgaacatcgccaccgtgccggagaccagcatggtccgtgaatttggctttgtgctggcggtaaaagccaatgtccccggcgaacacctgcaaacccatttccctgcccagatgaaggttgcgccagtgtcgaaaattcgcgatctggttcagcttcaactgccgggcatcatgcttcgggcaatgcccgtcgcgccgccgcagatcccgtggcatgcaggctacagctatttcgagctcgagaggggcagcgaactgtggcacgagatggacaagtccggggcattcgcgctgcatctcgcaggggaattcccgggtctcgatatggagttctgggccatccgtagcccgacagaataataaagcgagcgcttaatatgcaggaacgacaggataccggcagtgatgccgtgtttaccggagccagtgggaacaatcagctggtggcggccgccaatccgctgctcaatgcgattccgcaaatccgtcattcggtttcccacgacgatcaggtcgggctgcgccagcgcctgattgacgaaattcgccgtttcgaagtgcgatgccagcaggcgggcttaccgtatgaagtgattgtcggcgcgcgctactgcctctgcacggcgctggacgaagccgccgcgctgaccccgtggggaagcagcggcgtctggtcaagcaatggtctgctggtgacgtttcataacgaaacctggggcggtgagaagtttttccagctgctggcgcgtctgtcgcagaatccgcgcgaacacattctgctgctggagatgatcaactactgtctgctgctcggctttgaaggccgctaccgcgtgctggacaatggccggacccagcttgaaaccattaaacagcgcctgtggcagatgatccgtggcgtgcgcggcagctacccgccgccgctctcgccgcacccggaagatcgccccgttctgcgcaagctctggcggccgatgatccctctttgggcgtgcgtggcgctggtcggctttatcgcctgcctgttctatatcgtgctgaactggcgtctgggtgataacaccagcccggtgctggcgaaaatttaccagtcccaactgccggaaaccacgatccagcagcctgcgcgtcagctgccggcggtgctgaacctgcgcggcttcctgaaaccagaaattgatgccggtctggtggccgttaaggatgaggcggatcgcagcgtggtgatcctgaaaggggacggactctttgcctcggcctcaacggtggtgcgcgatcgctatgagccggtcatcgaccgcatcgcccaggcgatgaataacgtcagcggcaaaattctggtggtggggtacagcgacaacgtgccgatccgcagcgcacgcttcgcctccaactatgaactctcgcttgagcgcgcccgttcggtgcaaaaacagctccagggtagcctctcacagcctgagcgtgtcaaagccgaagggcggggtgagatcaacccggtagcgcctaacaccacgcctgaaaatcgcgcccgtaaccgccgcgtagagattacgctgctggtatcgcctgacaatacccaggccgagctgaacggattgccgcaaggaaactaaggatgctgacaactctactttctatactgaccaatcgcattctgtggagcttcctgggcgtaacggcgctcgcggcggtcatctggatgattggcccgctgttgtccatcgtggatacccggccccttgaatcagagcagaaccgcgtcatcagcattgcggtggtctacctgatttgggcccagagccacattctgccgcggctgtataacgcctggctgaaccgtaagctgatggacaagctcaacgaaaataccaccagcccggaggcggccgatccgcagaaacggctgaacagcgaggagcagatccttgccgggcgtttcgatgaagccgcccagatgctgaaaaaagcccacttcagcaaagcgggacatggcgcgcagtggacgcagcgcttcagcacgcagtacctctatcagctgccgtggtacgtcattattggcgcgccgggttccggtaaaaccaccgcgctggccaactccgggctgcaattcccgctggcggaccgcttcggtaaaaccgcgctgcgcggcattggcggcacgcgcaactgtgactggtggttcaccaacgaggcggttctgctggataccgcggggcgctataccactcaggagagtgagcaggttcaggacgccggggagtggctggaatttatcaacctgctgcgtaaataccgccgtcgccagcccatcaacggcgtgattatcaccatcagcatttccgacctgctttcgcagtccgctgaggcctcgcgccagcaggcggtcaacctgcgccagcgtctctccgagctgcatgaacagctgggtattcgcttcccggtgtatgtgatggtgaccaaagcggacctgcttaaaggcttccgcgcctggtttgctgattacgacaaagcccagcgcgaccagatctggggctttacgctgccgtgggagcagaccaaacacgccgattacgacctgatgggcaacttccagcaggaattttccctgctgcaacagcgtctggatgctggccttccggaaaccatgctcaaagagcatgacgccaaaacccgtgcggaagcctatctcttcccgcaggagttcaccgcgctgcgtccgctgctggctgactacctgagcacggtctttgcccgttcaaacttcgaaaccgaattttcgccgcgtggcatctactttgccagcggcactcaggaagggatgccgtttgaccgcgtgatgggcgagctgaatcgcgcgctctccttacctgaagggggggaaagcacgcgctgggattcggtgagcaaagaggcgccgatcccaggcgcgaagggccaaagcttcttcattaaaaacctgctgcaaaacgtcattttccaggaagcgggcatcgccggggaaaaccgctggtgggagctgcgcaaccgcgccgtgatgtggtccggctacgcggcgctgctggccctgctggtgatcctgggtggcctgtggctgaccagctacgccaagaataaagcctatctggaagaagtggatgcaaaagtgccgatgctggagcagcagagcaaggcgctgcaaaaccagccccagcgcgatctgtttgcgcttctgccgctgcttaacagcctggtggatctgccgaaaagcaatgccttcgacgttaacgacccgccggtttcccgccgcatggggctttatcgcggggatgacgtcagcgatgcctcgcagtctctgtaccagaaggcgctggatcagatgctgctgcccgccgtggcgatgcacattaccacctggctgcgcaacgacaacggcagcgacgtggagtacagctatgaggcgctgaaagcctatcagatgctctaccagccgaagcactatgacggcaaattcctgcactcgtgggtgatgctcaacctgcaacgcaacctgccgcagaacgtgacgcaggcgcagcttcaggagctggaatggcacctgacccagctgctggagccaaaaattcaggcttcaccgtatgcgcaggatgaggatctggtggcccgtgaaagggcgctcatcaaccagcagccgctctcaacacgcgtctatggccgcctgaaacgtctgctggagcatgatgaaaacctgaagccggtttcgctttcagatctcggcggcccgcagagcgagctggtgttttcccgtaaaagcggcaagccggtgagtgagggcgtaccgggtctgtatacgccggacggctactggaagagcttcaacgaccagatcgacagtgtgaccaccgccctgcacgaggacgacgcctgggtactgggagcgaccaccgctcaggaagataaacagcagatcgacaacgccgtgcgccagctctacatgcgcgactttatcgtcaactgggatcgctttctcgctgacattcagctcaacaacagcgccgatctttcccagcgtattaacaccgcgcgcctgctttcaggcaccaactcgccgctgcgccgtctggtgcttaacctgagcaaggtgctgaccctgtcgcgcactgcgcctgcgccggaagatgcgcagaaagcggaagaccaaagcaaccgcgccacccgcacgctggaagcgctgttcagcaacggtgacaatgccccgacgcaaggcgcggtcgtgacgcaggcgcctgagcaactggtgaccgaccactatgcgccgatgattgagctggcgcagccgctggagaagggtggcaagaccatcgtctttgacgattttcttaagcaggttgacgagctttatcgctacctgaccgccgttcaggatgcggcaaacagcggtatgcccgcgccgggtggggatgcaatcagccgcctgcaagccagcgcgggccgtctgccgggcgggctgcaaaccatgttcagcaatatggccgtcggcgccagcagcgacacccagcgtcgcgatctggagaacgtgcgtaagcgcattaacgtggaagtgggtgggttctgccgtcaggcgattgccgggcgttatccactggtgcgcagcgccagcaccgaggtgacgccggacgatctcgcccgcatgttcgcgccgggcaccggactgatggacacctttttccgcgacaacctgaccaacaaggtggacactacccaggcgaactggcgctttatgccgggcatcgacggtaaaacgctgccgggcagcgaagggctgttgcgtccgttccagcaggcgcagtctgtccgcgatgccttctttgccaacggcgcgaccacgccatcctttaaggtcacggtgcgcaccgtgcggatggacaacaccattctgaacctgacgctggacgtggacggccagctgctgcgctacagccacggtccgcaggcggtgcagatcatgaactggccggggccgggcgggacgaaccaggtgcgtatgcagctcggtctgaccaatggcagcaccgcaacgctggtaactaacggttcctgggcgctcaaccgctttttcgacaaggcgcgcaccagccctggcgcgggtagcctgagccgtcaggcgaccttcaacgtcgacggacatcaggtcacgctggagtttgccccgaacagcatccgcaacccgttccagcttccccgtttctcatgcccataaccgcaaggacagccgtatgacgaatacccctgcgatgaaccgttatagctggtatggcaaattacccagcgccggagattttttgcagcgtcgctttccggataccctgcaacgccagtggtcgcactggttccaggtcggcctgctggcctggcaacaggaagagcagcgcagcggcgagcgcccgttttctaaagccccggtgtggaactttgtcgtcccgccgatgctcggtagccagatgattcagatgggctgcctgctgccgggccgtgacagcgtaggccgccactatccggtatgcctgcaactgagcttcacccccgccgagtggtcatcccgcctgctcgggcaggctgaaagctggtaccagcagcttggccgtctggggctgcacgccgtgcgtaacagctattctgcctcccagctggatgaaatgctgatgaccatcccggcgccccagccggttgagccgcaaaagcgttccgacattctcgacgtgattggctatgacgacgatggtcagagcacgctgggctggccgcaggcggcggagtgttttgatccgctgcgccagaccagctactggtggacaaaccgctgcgacggctatccgctgtacacccacgtccacagcggaaacttcaccgggcagctctttacgctgctgttcgatccggcaggcggcgcccgtccgggccgccacggtctttacccgcctatgtttgaataagcagggatcttatgaatatcgatgaatttctcgcgccgataagccccgataacccctgcggtgaaaacctggagtacgacgctgatttccaggccatgggtcaggccagtcagggcaaagccgagcagcagtttggcgacaccatcattccggcagagcctgccgactggaacacggtggaaaaactcgccaccagcctgctgggtcgcaccaaagatcttcgcgtcatgctggcgttaacccatgcctggacgcgtcgtcgcggtctggcaggttacgccgacgggctactgctggtgcaggaagccctgtcccgttactgggagcaactttaccctctgctggaagagtatggcgaaaccgatccattctaccgcatcaacgccctcgccgggctgagtgataaatctgacctgacggtcgcggtgcgtaacgcctcactgctccgctcaaacggcgatgagatttcgctccgtgacgcccaggcgctgcttgacggcagtaaaaccgagtgtccggattatccgggcggtcgtccacggctgatcgatgagctggcccggggcgatcagcccggcaccgaagcggtaatcgtgatcaacgaacgcctgctggccatccgcgaactgcttaccggctatctcggggaaagtggcgtcccggagatggaacagctgctgaaaactgtcggactggtttccagcgcctgtcaggtgaccgatatcagcaagctgctgccgaaccgtgacgcgcaggctgaacagcacgccgagccgcagccggtggccgcgtcgcccgttcagcaggtgacggactggcgcagcgtgcaggtgaccagccgcgccgacgcccagctgatgctggaaaaagcgaagcagtattttgcgcagtacgaacccagccatcccgcaccgctgatgattgaacgggtgcagcggctgtctgaactcaactttatggacattattcgcgacctggcgccagacggcgttaaccaactggaaaacatctttggacgccgcgaatgacgcgtcctggcattatgacgacaggcatggagtctgccgtttcaccttcaccgcgcatctttgatggagaacatcatggcaatgagtaacagtggacagaaattcatcgcacgcaaccgtgctccccgcgtgcagatcgagtacgacgtagagatctacggcgcagaacgcaaaattcagctgccgtttgtgatgggcgttatggccgatctggttggcaagccggtggaaaatctgccagccgtcgacgagcgtaagttcctggaaatcgacatcgacaacttcgacgaacgcatgaaggcgctgaagccgcgcgtggcgttccaggtggataacaccctgaccggcgaaggtaagctcaatgtcgatctgaccttcgacagcatggacgacttcctgccggacgcggtggcccgcaaagtagagccgctgaacaagctgctggaagcccgtacccagctctccaacctgctgacctacatggacggtaaaaacggtagcggaagagctgatcgcgaaaattctccaggatccgacgctgctcaaatccctgagccagttgccaaaaaatgacgaaagtgcgaaaggtagcgaggaataatcgatgagcaaccagactcaacaacacgatcagcaggcgggccaggcgttcagccaggacgagttcagcgcgctgctgaataaagagttccgcccgaaaaccgatcaggcgcgctctgccgtagaaagcgcggttaaaaccctggcgcagcaggcgctggaaaacaccgtaaccttctcaaacgatacctaccgcaccattcagaacctgattgccggtattgacgagcagctttcacagcaggtgaaccagattattcaccacgaggagttccagaagctggagagcgcctggcgcgggctgagctacctggtgaacaataccgaaaccgacgagatgctgaagatccgttttatgagcatctccaagcaggagctgggccgcaccctcaagcgctacaagggcgtgggctgggaccagagcccgatcttcaaaaaaatctacgagcaggagtacggccagttcggtggcgagccgtttggctgcatcgtgggcgactactacttcgaccacagcccgcaggacgttgagctgctgggcgagatggcgcgcatcggctctgcggcccactgtccgttcatcaccggcaccgcgccgggtgtgatgcagatggagtcctggcaggagctggctaacccgcgcgacctgaccaaaatcttccagaacactgaatacgctgcctggcgttcactgcgtgaatcagaagatgcccgctatctgggcctggtgatgccgcgcttcctgtcgcgtctgccgtacggcattcgcaccaacccggtcgacagctttgattttgaagagcagaccgacggcgcgaaccacaacagctactcctgggcaaacgctgcctatgcgatggcggnnnnnnnnnnnnnnnnnnnnnnnnnnnnnnnnnnnnnnnnnnnnnnnnnnnnnnnnnnnnnnnnnnnnnnnnnnnnnnnnnnnnnnnnnnnnnnnnnnnnnnnnnnnnnnnnnnnnnnnnnnnnnnnnnnnnnnnnnnnnnnnnnnnnnnnnnnnnnnnnnnnnnnnnnnnnnnnnnnnnnnnnnnnnnnnnnnnnnnnnnnnnnnnnnnnnnnnnnnnnnnnnnnnnnnnnnnnnnnnnnnnnnnnnnnnnnnnnnnnnnnnnnnnnnnnnnnnnnnnnnnnnnnnnnnnnnnnnnnnnnnnnnnnnnnnnnnnnnnnnnnnnnnnnnnnnnnnnnnnnnnnnnnnnnnnnnnnnnnnnnnnnnnnnnnnnnnnnnnnnnnnnnnnnnnnnnnnnnnnnnnnnnnnnnnnnnnnnnnnnnnnnnnnnnnnnnnnnnnnnnnnnnnnnnnnnnnnnnnnnnnnnnnnnnnnnnnnnnnnnnnnnnnnnnnnnnnnnnnnnnnnnnnnnnnnnnnnnnnnnnnnnnnnnnnnnnnnnnnnnnnnnnnnnnnnnnnnnnnnnnnnnnnnnnnnnnnnnnnnnnnnnnnnnnnnnnnnnnnnnnnnnnnnnnnnnnnnnnnnnnnnnnnnnnnnnnnnnnnnnnnnnnnnnnnnnnnnnnnnnnnnnnnnnnnnnnnnnnnnnnnnnnnnnnnnnnnnnnnnnnnnnnnnnnnnnnnnnnnnnnnnnnnnnnnnnnnnnnnnnnnnnnnnnnnnnnnnnnnnnnnnnnnnnnnnnnnnnnnnnnnnnnnnnnnnnnnnnnnnnnnnnnnnnnnnnnnnnnnnnnnnnnnnnnnnnnnnnnnnnnnnnnnnnnnnnnnnnnnnnnnnnnnnnnnnnnnnnnnnnnnnnnnnnnnnnnnnnnnnnnnnnnnnnnnnnnnnnnnnnnnnnnnnnnnnnnnnnnnnnnnnnnnnnnnnnnnnnnnnnnnnnnnnnnnnnnnnnnnnnnnnnnnnnnnnnnnnnnnnnnnnnnnnnnnnnnnnnnnnnnnnnnnnnnnnnnnnnnnnnnnnnnnnnnnnnnnnnnnnnnnnnnnnnnnnnnnnnnnnnnnnnnnnnnnnnnnnnnnnnnnnnnnnnnnnnnnnnnnnnnnnnnnnnnnnnnnnnnnnnnnnnnnnnnnnnnnnnnnnnnnnnnnnnnnnnnnnnnnnnnnnnnnnnnnnnnnnnnnnnnnnnnnnnnnnnnnnnnnnnnnnnnnnnnnnnnnnnnnnnnnnnnnnnnnnnnnnnnnnnnnnnnnnnnnnnnnnnnnnnnnnnnnnnnnnnnnnnnnnnnnnnnnnnnnnnncgaaagcaatattgttcatccacgaagagtagatattatggctattgatatgtttctgaaggtcgagggtgttacgggcgaatctaaagattctaaccacaccggctggactgatattacctccttctcctggggcgcgtcccagccaggtaatatgagcgttggcggtggcggcggtgccggtaaagtgaactttaacgatctgcacgttaacgctctgatcgacaaatccactacagcaatcctgaaacactgcgcaagcggtaaacacctgaccaaagttgaactgtccgtctgcaaagcgggtggtcagcaggttgaatacacccgcatcaccctggaagacgttctcgtgacttccgttcagtacacgggtgcagacaacggcgataccgttggcgtgacctatgcattccaggctgcgaaagtgaaacagcagtactgggagcagaccactgccggtggtaaaggtgctgaaagcagcgctggctggaacatcaaagaaaacaaagaagcgtaattgcgcgcgtgaccggggagttttccccggtcattatttatagagacttaatttcgtttgcaaagggatgtcaatatgagcgtaaaatcaacggttgctcctggttattgtgttgttcagcaggctggtacgttagatttccaggcaagactactgttcaataaaccagacagtgaagcggcacgttattttatgcaagtgaacagggacacacggtggttaaaacccgggcaaatattgatccttaatgctccgggtgctgaaaatgcggttcagctaaaacaattacaaaatgcaaagcaaaaggttaatggagcattggcagaactgaatacagatgaagctaatttctttaacaagcattttagtaccatcgcagcattaactaattttatggataaatctctcggggtggttgctgatgcaggtgaaaggtactttagcgaaatagaaaagaaattaaaagctatcgaactggcttatcaaaatcaatacagaacgcaaggcacattgatcgggcagcagttttttgttgaaaggcaaaaacttttttctgagctggacgttttattaaataagctgtccagactaacgctgaaactgaaaccttatgaagaaatcaagcacgctttaggtttatcaagcaggtcaattgtccacgaatggagtactgcgggtgttgcctcgatacgagggtattcaacatatgtagacaatgcttcaaaagctgcccgttttctgaaaatgggaggatggcttgctatcggcttcgctggtgcaaacacaaccaatgaagtttacgatgcctgtacagtaggtagagagcagagttgttccaaagtcgccgttaagaagtacagtcaatttggcgccagtcttgcgggcgggatttatggcggaaaatatggcgccatggctggggctggcgtatgtgttgcattgggcgtggcaacaggtggtgtagggttgctcgcgtgttctgtggtaggagccgctgcgggtggatacattggtggcgaagttgccggtggagcaactgaatatgtcatggataagctatggtgaatttagaaaatattcttttatttctgattgttgttttatttttacttgtcgtaattatggacttcatcagttcccgttattttaaaaaacacgaggccgaatataatcagcttctttcagaatataggcaaaaaggctacgatctcgatctggtgacaaattacgcatcattttttggttcgctggcgaactatcaaaaaataatctggtttgttcgtcttcgcaaaggcgtgaagatgaaatttaccaaagacagaaatgttcaggacgatgcctataaattcgttcaggctttaccggaagagagaatcggctggatattaaaactgcatcgacgctataaagctcaggccttactttttacgctatggctgcttatcggcattattttcctgaatgtagtcaaatagctttaatcagcccttaacccccaaaccccgccgttctcacccccgagagcggcagcgtttgagcgctaatcataccagcaggaatacgccatgcgattcacgattatttctacgaaacccggtcatcagccgccgcaaagcagctgtgatttttatgccccgggcggcaccattgggcgcggtacggataacaatctggtgctgccggacaatgaccgcaccatctcgcgtttgcaggccatcgttcacgtcgacgccagtggcgaatgccgcgtcacgaaccgcggcagcgttacccgcgtggtactgaatgatatcccgctggagcgtgggcgtcaggttgagcttcaggatggggatattctcggtattgatgattatcgcattgaagtcagcgaactcattcatgacacccagcccgtaagccgcatggcggccagcatgcagcaggcgcgcccagtggcgacacctgcaccagcgccgcaaccgaaaccggccagcgccgcgcctcgtggaaaagctgaacctacggccgtgccgtcggaaatctgggacagcctgatgcaggagttttccatctccgacagcatctccagcaaccgggcaaaaccacagcccgccgcatcccacgatccgttctctcagcctgcggccccggagcggaatgccgaagatccgctggcaatgtttaacgacgccgaaccgtcgcttgaacgtaaaaacgttgacccggacacgctgtttagcgatgaagcgttgtttaaaaaagagagcatctttgacgatgtcaccccttcaacgctggtacagccggacgaaagcaaacctgcccagccaaaggaagaggcgtcggacgaactcgatccgttagccctgtttggcgggtcggcgagcgcacctgccgcgcgtcacgatgaccctctcggcctgatgggcggcgcgccgttaacccatccggatgaaatcgtggccgataagccggagccaaagcctgaaccgcaagccgcacaggaagaggatgcgctggccagctcaccgctgttcgatccggaaccgactgaaccacaggacgcgccgcgcgcggaagaggagcccgcgcgccccgattacgctggcttcaccatgccaacaccgcaggccgtggcgcgcagcaacgcgcaggcgcctaaaggccgactgcgtatcgacccggttaaaaacgctgcatcgcctgctgcctccgcgcagaccggcgagcggggcgaggtgcttcagggcgaactgctggaggcgctgctggagggcatgggcctgagcgaaatgcagccggtaccgcaattcgaccgggaaaatatgcgtcagctggggcagatcctgggcatgttctcgcaggggaccgtggcgctgctctcctcgcgctccatcctcaagcgtggggtgaaagccgatatgaccatggtgctcgacgatgcgaacaacccgttcaaactgttgccgaccgggaaaacggtgctgatccagatgttcggcacgccgatgccgggctttatgccgccgaccaaatcggtgcgtgatgcgctgatcgatctccaggcacaccagctagggatgatctctggtatccgcgccattatcgccgccatgctgcaatcctttaacccggaacaactggaagagcaggcgaagcagaacgggatgacgtcacgcctggcgctgccgggcagccgtaaagccgcgctgtgggattatttcgttcgcagctatggcgagacggcgggcgagatcgaggacgacttccataccctgtttggcgaagccttcctccatgcctatgacatggaggtcaatcagtacaaagactcacaaagcggatcggaagaaaaatgaatatcgcaacggcttctctctcccgccaggggacgcgcgccagcaaccaggatcagacgggagaaaccatcggggaacgttcagcctgctttgtcgtctgtgacggcatcgcgggcctgccgggcggcgaggtggccgctgagctggcccgcaacagcattatttcccgctttgacggcgacaagcacctgaatgcgcagcatattcgtgactacgtccaaacggcgaaccgcaccatcctcagcgaacaacaggccgtgcaggactatcgccggatgggcaccacgctggtcagcctgtttatcgacagggattaccgtctggcttactgggcgcacgccggagacagccgcctgtacctgtttcgccgcggctggctgtggcatgtcaccaccgatcacagcctcgtccagcagatgaaagatgccgggcatcagaccgacgatctcaacagcaacctgctgtatctggcgctgggtattgagaatggcggaccggaagcgagctacagcgatgtcgtgcaggttgaggacggtgatgccttcctgctctgcaccgacggtttctggcacggcgtcagcgaagagcagatgaagcagtcgctgcacatggtcaatacgccacaggagtggctgaccttaatgaaccaaatcattcaaaagaatgccgaacaggagggcaatgctcaggataactataccgccgtggcggtgtggatgggcaaccctcaggacaccactttgctgcatacgctctctgacgcagcacaatttcttccctgcggaactgattagacacacaaggattgatatgaaactttggctatcgggtttggctcttctgacggtggcgaccaccgcacaggctgaaaacttccgcatcgtgcagtctcctgcgcagaagctggatatctggatcgacaacattaaagacaatacgccgcaaagctggtgtaaggcggacgtggcgctgcgtatcgtggcgaacggcaagaaagaggtttcggtgctggaaaacttcgtgccgcgccttggctcgctgctggagcaccagtgcagcaagctgaataccctgaactggacgcttaacgatccggaaggcacgacgcttgcccggggcacagcggctaaagcgcaggactgggcgctggtggtgaagcagcaggaaacggcggcggcaacgacccccacctcaggcgcgctgctgccgcctgaccagaatccggagacgcacaccgtggcggcagatcgtacgccatggcaggagttcacccttcaggacggttgccacctgcgcaccttctgggagggcggttcctccgcgccagcgctgtttattccggattccgacaccacccgctgcggcaacggcagctggctcagcggccactccgtggtgacgcagaaccgtaacgggacgcagaaagcgattccggtcacctacattcacggcttcccggtgatggggctgaacaacgcggtcgatcctgaaaaggcgctgatcacctccgtcaacaaagaacgcatggtcttcagcacccagaacagcgaccagagctggatgatcctgccgtacgacagcaccctgaacggctggaagagcaacggcacggtggcggtggaaatcacccgtgagatcgccagcgacgacgccagactccaggcgcgtatcgcagaggtgaagaagatctggagcgcatgggttgcaccgggcgcggagctgaacgttgttctgattgacacgctgcgtccgcagctgcgcgatccggcagtgggcgcctggcgcgcggcgaattaaggaggggctatgaatacgctttatcaacgtctggcgggggagtcgattagcgacgcgctgcttcgcctggaagccgatatcaaagcccgtccggcggatgccgatctgcgcgccgcgtttgtgcagtttctgatcctcagcggcaactgggcgcgcgccctgacccagctgaaaagctggctggcgctgaagccgcaggcaaaaccgaccgtaacgctgctggagcaggccattcagggtgaacagcagcgtgcgcgcgtgttcgcgggagaggtacgaccggcaatgcccgaggcgcagtggccgtggctgacgacgttagcccaggcgctgaccgaaagcgcagggcaagcgcaaacgctgcgcctggcggcactcgaacaggccccggcaagccgcgggcaggtcacgctggagaatgaannnnnnnnnnnnnnnnnnnnnnnnnnnnnnnnnnnnnnnnnnnnnnnnnnnnnnnnnnnnnnnnnnnnnnnnnnnnnnnnnnnnnnnnnnnnnnnnnnnnnnnnnnnnnnnnnnnnnnnnnnnnnnnnnnnnnnnnnnnnnnnnnnnnnnnnnnnnnnnnnnnnnnnnnnnnnnnnnnnnnnnnnnnnnnnnnnnnnnnnnnnnnnnnnnnnnnnnnnnnnnnnnnnnnnnnnnnnnnnnnnnnnnnnnnnnnnnnnnnnnnnnnnnnnnnnnnnnnnnnnnnnnnnnnnnnnnnnnnnnnnnnnnnnnnnnnnnnnnnnnnnnnnnnnnnnnnnnnnnnnnnnnnnnnnnnnnnnnnnnnnnnnnnnnnnnnnnnnnnnnnnnnnnnnnnnnnnnnnnnnnnnnnnnnnnnnnnnnnnnnnnnnnnnnnnnnnnnnnntctgggtgccgttctgcgccatcgacgcgatccgttttcaggctccggccagcgtgaccgatctggtgtggcgtcatgcgctggtccgcctcacggacggcaccgagcaggtgtgtcagatcccggcgcgttatccgtttgctgacggggcgccagacagcgttaagctggggcgcaccaccgaatggctcccgctggacgatgacggcgccctgtatgaaggcatgggacagaaagcctggctgagcgagcaaagcgaaagcccgctgcttaccctgagcctggtgacatttacctcggatggtgcggatgagtaatcccgcaggcgaaggcgatctgctgcgcagcggctggcaggcccgcagcaggcaggagaaagtgggggcgcgcgacaaaatgcagccctcactgctggatcgcctgacggataacgatccggaaaaaaaacgcgagtccgccaacagcaatctgattacccacgccgcgctgcgtcgtaacgtcctgcgggatttacagtggttgtttaacaccattaaccacgatgcctccagcgatctgagcgggttgacgcaggtgagccgttccgtcgtgaattttggcgtggcgccgctggcggggaaaagaatgtccgatatcgaatggcacgacattcagcgcaagctcaccgaagcgattattaactttgaaccgcggatcctgccgcaggggcttcaggttcgctgcgtgtccgatacctcctcgttagatctgcacaacgttctgtctatcgaaatcaaaggtcgcctgtggtgcgtgccgtatccgctggaatttctctttcgcaccgacgtcgatcttgagaacggccattttgaactgaaggatgcggggtaattatggaaagcaaactgctcgaatattacaaccgtgaactggcctatctgcgcgagatgggcgcagagttcgccgagcgctacccgaaagtggcggggcggctcggcatgcgcggcatcgaagtggcggacccgtacattgagcgcctgatggaaggtttcgccttcctgacctcccgcgtgcagatgaaaatggacgccgaattcccgcgcttttcacagcgtatgctggagatgattgcgccaaattatctggcgcctacgccgtcgatggcgatcgctgaaattcagcccgacagcagccggggcgacctgagcaaaggctttattgtgccgcgcggcaccatgatggacagcctggcgctgaaaaagaccggggttacgtgcagctataccacggcgcacgaggtcaacctgctgccgttaaaaattgagcggatcgagctgggcggcgttcccgccgatctgccgctggcccagctcggcctgagccagcgggggatcagcagcgccttgcgggtccgcattgcctgcgatggcccgcagcatctcgggcacctggactttgaccgcctggagttcttcttaagcggcccggacatcgaggcgctgaagctgctggagctggtgatggagcaccacgcgggtattgtctgccagacggtcagcaagcagccccagcgccagctgctgtcgtctgacgccctgcgtcaggaaggctttaatgcggaccaggcgctgctcccggacgatctgcgcaacttcgacggctatcgcctgttgcaggagtactttgcgttcccggcgcgttttcgtttcatcagcctgagcgggctgggcaagctgatccagcgctgcgaagacgaaaaagcgtttgatatcttcattctgctcgacaagagcgacgatcagctggagcgcgtggtggatgccagccacctggcgctgcactgcacgccggtgatcaacctgttcccgaaagtggcggcccggcagaagctgagcgaaagccagcatgaataccacctggtggtggataacatccgcccgctggattatgaaatttatgccgtgaaaaaaatctatgccagcgcggatggtcagcgggacgaccagacgtttcgtccgttctggagtacctggagcggagacgcgggcaactacggcgcctatttttccctgcgccgtgagcagcgcgttctctccgaacacgcgctgcgctatggcacccgcacgggctatatcggctcggaggtcttcgtctcgctggtggatgcgcagcacgcgccgtggcaggagaatttgcgctacatttccgccgaggtgctgtgcaccagccgcgacctgccgctgatgctccagcaggagcttgggcagtttattatggccgactccatgccggtgaaggcgttaaccctgcgtaaaggcccgacgccgccgcgtccggcgctggccgaagggttcagcacctggcggctcattagccagctgcaaatgaactaccttagcctgatggacagcgaaaacgaagagggcgcagccgcgctgcgtcagctgttagggctatacgccaacctcgccgagacgccggttgcccgtcaggtggatggcgttcgtcactgcgtgctggagccggtgcaccgccgcgtgcctgaacccggcccggtggtgttcgcccgcgggatcggcatcaccctgacggtggacgaacgcgccttttccggcgccagcccgtggcttttcggcagcgtgctggaacgcctttttgcccgcctggtctccatcaacagctttacggagttcacgctcaagagccagcagcgcggcgaaatcggctactgggcgccgcgcatgggtaaaagggcgctggtatgagtgaagttgcccctgtaacgctgcgcgtgcatcgcctgacgccgctccccgatgcgttctggcgcggggtgcgcgagacgccgtggcgctacgatctgttccagctgttaagacgcattgatgcccagggcagtgagcgttacccgctggggcgcgcgccgctgcctaaatttgagccgctgcgtattggtcagcagccttcaatgggctttgcgccgtcaacggttgctgaggtccggcagcgggaagagaacggactgcatgacgtttccatactgagcttcggcctgtttggtcctaacggcccgctgccggtgcacatgactgagtatgcccgcgagcgtattcatcatcatcaggatcacagcctcagcgcgtttgccgacctctttcaccaccgcctgacgctgctgttctaccgcgcctgggcggacgcgcagcctgccgtttcactggatcgcaacgacaacaggcgcttcgaagggtatctggcatcgctgattggcatggggcagcctgcccagatgtcgaaaggcagcctgagcgcgcacgcccgctttactcacgccgggcacctgacccgacacgggcgggacccggaagggctggagaaaatcctgcgcaactatttcaacgtgccggtcaggctggtggccaacgtcccgcagtggatgccgctctcaacgcgggagcaggcacagctgggcgaggggcggcgtatgccgcgcatgggagagtccgcttttctcggcattgcggtacgcgacgtgcagcataaatttcggcttgagattggcccgttgagcgcagacgactacaaccgttttctgccgggcgaagggtgggtgaccgagctgcgcgactgggtgcgacagtacgccggggtggaatttgaatgggaaacacgggtgatcctgcgcgccgatgcggtgcagggcgccacgctcggtagcgccgggcgattagggtacaacacctggctcggccttcagcctcagcctgttccgcgtggcgatctggtgtatcgcgcagagcgataatccttccgtataccgaatcattgttaatggaaactaacatgtcagaaattagccgtgccgtgcttttcggcaaactggatacgctgttatttacctctctggaaagcgcgactgccttctgtaagctgcgcggcaacccgtacgttgagctggtgcactggctgcatcagctgatgcagcagcaggatggcgatctgcaacaggtcattcgtcacttcgcccttgatgaacagcagctgacgcgcgatatcgtggcggcgctggatgccctgccgcgtggcgcgagttccgtgtctgatctttccgagcatatcgacagcgccgtcgagcgcgcctgggtctacggctcgttgaagtttggcgtcagccgcatccgcggcggccatttgctgatcggcatactgaaaacgtggaatctggctaacgtgctgaaaagcatttcggcgcagttcacccgtcttaacgtcgaggtgctgatcgagcagttcgacgccatttgcgccagcagcaaagagagccagcaggccgccgccgctgcggacgcgcctgccggggcagtaccggctgcgcagggcacgctggcgcagtatggtcaggatctgacggcgcgcgcccgggaagggaaaatcgacccggtggtggggcgcgatgaagagatccgccagatggtcgatattctgatgcgtcgtcgccagaacaaccccctgctgaccggggaagccggcgtcgggaaaacggcggtggtggaagggctggcgctgcgtatcgctgacggcgacgtgccggagccgctgcaaaacgttcagctgtggctgctggatatcggcatgcttcaggccggcgcgggcatgaaaggggaatttgaggcgcgcctccaggcgctgattaacgaggtgcagtccagcgccacgccaattattctgtttatcgatgagatccacactctgattggcgcaggcggtcaacagggcaccggcgatgctgctaacctgctcaagcctgccctggcgcgcgggcaactgcgcaccatcggcgcgaccacctgggcggaatacaaaaaatacattgagaaagatccggcgctgacccgccgtttccagaccgtacaggttcacgagccggacgaagccaaagccgtgctgatgctgcgcagcaccgtgtcgccgctggaaactcatcatcaggttttactcctcgacgaagcggtcagcgcggcggtgaaactgtcgcatcgctatattcctgcgcgtcagctgccggataaagcggtggcgctgctggacaccgcctgcgcgcgcgtggccgtcagccagagcgcgccgcctgcccagttggaagactgtctgcgtcacctggcggccctggacgtggagctggagattgctgaacgcgaagcgcgcgtgggggcgggcgatccggcgcgtgtggcggccttaaccgccgaacgtgacgcgttcgaaacccagcgcgaagccctggcccgtcgctgggaagaagagcgcacgcgggtgcaggagattatccttctgcgtgccgcgctgtttgcggcgggtgatgaggatacggctgaactgcgcggccagctggcagaacagcagcaggcgctgaagaccttacagggtgacgaaccgctgctgtttgccgcggtggatgagaacgtggtggctgcggtggtctcagactggaccgggatcccgctgggccggatggtgaaaaatgagatcgacgcggtgctgaatctggccgacacgctgaaccagcgggttattggtcagcgtcacggtctggatctgattgcccgtcgggtaaaaacctcgcgggcgaagcttgacgatccgaacaaaccggtcggcgtattcatgctctgcgggccatccggcgtgggtaaaaccgaaaccgcgctggcgctggcggagtcgctttacggcggcgagcagaacgttattaccatcaacatgagtgaattccaggaagcgcacaccgtttcgacgttaaaaggtgcgcctccgggctatgtgggctatggtgaaggcggcgtcttaaccgaggccgtgcgccgccgtccctacagcgtggtgctgctggatgaaattgaaaaagcgcacccggacgtgcacgagatcttcttccaggtcttcgacaagggctggatggaggacggcgaagggcgtcacattgatttccgtaacaccattattattctgacctctaacgtcggcaccgacctgatcgcagccatgtgcgccgacccggaactgatgccggagcctgacgcgttaagcggcgccctgcgccagccgctgctggaggtgttcccgcctgcgctgctgggccgcctgctggtggtgccgtattacccgctgagcgacgagatgctggggcagattgtgcgtcttcagctcaggcgcattcagcgtcgtctggaagagaatcacaacattatttctgaatttgacgacagcgtggtcgaacagattgttcagcgctgtaccgaggttgagtcgggcgggcgtatggtggatgcgattctgaccaatacgttgctgcctcagatgagccagattttacttaccgccagccgcagcgacgagcagtaccgacgtctgcatgtcacctgcgagcagggcgaattccactgtcagtttgccgcgtaataatcatcaagagaactgtaaaagatgacggataatgataacaatcggactgtcccaaacgcgctcccggtcgggtaccgtttcaatgagtttgagataaaagaggtgattggcggcggcggattcggcatcgtctatcgcgcctgggatcaccagctcgaacgcactatcgctatcaaagaatttatgccttcctccctcgccgtgcgcggcgaggatatgacgctggtgctgcgcagcgagcgcttcggcaaagcgttttctgccggtttgaacagcttcatccaggaagcccgcctgctggcgcgctttaaccacccgaacctgctgcacgtactgcgtttctgggtgcaaaacgacacggcctatatggggacgctgttttacagcggtaccacgctgtcgcgtctgcgcgaagagaaaccggagctgattaacgaggcgtggatccgccgcatgctgccaatgctcttcggcgccatcaaaacgatccacgacgagggttatctacaccgcgacatctcgctggataacattcagattcaggataacggcctgccggtgctgctcgatttcggatcggcgcgccgcaccatcggtaatctctcggatgagacggaaaccatgctgcgtccgggcttcgcgcctatcgagcagtataccgacgacaatgaaagcgagcaggggccgtggacggatatctacgcgctcggcgccgtattgcgcaccctcatcgtgggctctccgccaccggtcagcgtggtgcgctcgattcaggacacctgcaaaccgctggtggagctgatgccgcaggggtattccatcccgttgctacaggccatcgacaaggcgctggcgctgcatatggaagaccgtccgcaatccattgaggagttcgcggcgctgatcgagatgcccgtcgccggtatcgacgaggtgctgaccgcgaagaagaccggcacgatgctggtgccggtggaagaggagacatctgcttccgcgctggactggcgacgttacaagcttccggggctggtggctgcgggcgtgctggttggggtggttgccggtgcgatgctgttcggcggcgacagtcaggaaacgccagcgcagacggcgcaaacgcctgccgtgagccctccggctgagacctccgcccaggcggaaaccagaccggcaacggcagacgtgagcgagccggttgcgccacctgcttcggcgcagcagagtgcgccgcctgtcgacgccagcccggtcgcgttggtctacattcgcatgcttgatggcgagacgctgaaggtgaacggcgagtctaaagcgctgcgtccggggaataacggttacgcatcgctgaaattgcctgcgggcgagacccgcattgaactggaaggcaatggaagaacgcgtacccagacgctggatattgcgaagccaggcacctggctggtgaatccgtaagcctgcgggtaacaggacggagcgaatgtataacatcaagtttgtctatctgttccacgagaacgtctcgccagcgctgtttgcgaaaataatccgcccgtccgttgccggacagtggattatgtcggttcccgaccattcgctgcgctcgctcttcacgcgctacgatctgctgcgcacgatcaccggtgcgaatccttatcagtccgggcgcgatacccgcacgctgatcgcgcaggatttagagatgggcagagtggttgccattgacgaaagttttcgtgactggtcatcagtaacggaaattttttacatcaatgccaaagggcaactccaggctgcctcgctggtcggcctgggctggtatccggtgagtacgattgtcgaccgctacgnnnnnnnnnnnnnnnnnnnnnnnnnnnnnnnnnnnnnnnnnnnnnnnnnnnnnnnnnnnnnnnnnnnnnnnnnnnnnnnnnnnnnnnnnnnnnnnnnnnnnnnnnnnnnnnnnnnnnnnnnnnnnnnnnnnnnnnnnnnnnnnnnnnnnnnnnnnnnnnnnnnnnnnnnnnnnnnnnnnnnnnnnnnnnnnnnnnnnnnnnnnnnnnnnnnnnnnnnnnnnnnnnnnnnnnnnnnnnnnnnnnnnnnnnnnnnnnnnnnnnnnnnnnnnnnnnnnnnnnnnnnnnnnnnnnnnnnnnnnnnnnnnnnnntggtgaaatctaaaacggcacaggtgccggatgaacctactccgggcaaggacggtaaaacctatgccgggcagcttcagaagatgaccaaagcagagcgctggcaggcgcgtaaagatctgattgcgaaggggagcaatagcctttatccggatgcccagatcgccgctaagcgtctggcggcgaataatatcgcggtggaaaaagcgaagcttgcggaaaatatttataagaccgtgaacccgctggaaaccacaccgggcgtgccggaggggtggacggatatcagtaatgacgatgcgctgttaggaaagttcgggctgaacaaatcaatgctctttgacgatgatacgtcccccaattttctggcgcgcgtctatcaaccgaagccggaagtgtttggtacagatatgaaccccacgctggtattcaggggatcgcgcgagcctggtttcgcctctctgtctgagaatgtctcctctttactgaccaaaggggagctggcgccggtggtaaacggggctgactggtcgaataacttctcacagggcatgggtatggcttcagattattataaaaaggccgtgagtatcggtaaggagctggcaaggtcaggccagaatattgatattgccggtcattcccttggcggtggcctcgcctctgcaacctctatgggcagcgggaaagcggggtggacgttcaacgccgccggcctgaatgccggaaccgtagaaaaatacggcggcaagatattaggcagtacggataatatccaggcttatcgggttgaaggtgagctgctgacgaagattcaggaagttaacccctgggaggatctgaaaacgatgaaagggcatgtcccttcgtggatcctcaaagaggaaatctctgcgctgagccctaatgctgccggaataccccacgatcttcccggtggaaccggaagcgcgctggaccgccacgggattaatcaggcgattgattgcatagagcaacagaaggacgaggatatttcgataatcgggagtcgattgtgaaaaaacggttgatggcttttgtcgcgttatgttttttattcatgattcaggggtgtaagcaggatatggaccttaatccacaggactacttcagcggtcagcagcttgaactggcgaaagcgattgaagaaggtgatgtcgacgcggtgaagacgcttgcaccagaaagcgatcttaataaacagggaaagcaggatatgaccctgcttttttgggccatcggcaacgcgattaatgataaaaaaacatcgccccatttaaaggtgattacgttgcttgttaaggccggcgcagatccgctccagcctcgaccgcagggaaaaagcagccctgccgaatttgccctgaagggggatagcgcagactggatcaacgctatgctggacggtggcctttcgcccaatgtgaaagataaggtcttccacgaacccatcatcttccagtcgctaaaagcgaaaaatacagagacgctggaagccatgctcgatagcggagctgacgtcaatgcaaccaattcactgggtaaaacgctggtgtttgatgcgctggataaccaggcttacgatcatgtcttgttactgctcgatcgtggagcggacccgtcagttaaggctaaaaatggctggtcaatgagcaatgcgcttgcggacgcgctgagtggacttgatcgaggcagtgagcaatacgagaagttaaacgaaataaaagagaaacttattcagaaagggggcgtgtggccacctgcgccggttaagtgattgctcaactttcatgaaagccagagataaggttttttccggagtttccattagcctgtactctttggatttataaaaacgaaagttcgtacctccagacaaatcaacccagcattgcatcaatccaaaaccacctcgtcgaaattagctttacgttcataaacgttcccagcataaaccattacggaataaagattatgctcaaccgaattaccgtccagctcccggttgaggggctgcttttctggaaactctccggccgtgaggcgatgtccgagtcgttcgcgctgacgctgaccctgctcggcacagacgcgcgcattgaccgcagcaagctgctgggccagccggtcacggtgaccatccccacgcagaacctgctcaccccccgctatatcaacggcaaggtgacgcgcgtggcggtgagcgccgtggagctgacgggcatccgctacgcggtgtaccagctgacggtggagccggacctgtggccgatgaagcgcgaccgtaacctgcgtatcttccagggccagacggtaccgcagattgtcaaaaccctgctgggtgagcatcaggttaacctcgaagacaaacttaccggcagctaccgggtgtgggactactgcgtgcagtatcaggaatcgagcctggacttcatcagccgcctgatggagctggaggggattgcgtactacttcagccacgaggcggacaagcataccctggtactgaccgacgccgcgacacagcaccagccgttcagcggctatgaggtcattccttaccatcagacgccgtccggcggcagtacggatgaagagggcatcagccagtgggcgctggaggacagcgtcacgccgggaatttacagcctcgacgactatgacttccgcaagccgaacgcgtggctgttccaggcgcagcagaacccggcgtccccgaagccgggcagcatcgacgtgtacgactggccgggccgctttgtggagacagggcatgcggagttctacgcccgaatccgtcaggagcgctggcaggtggagcatcagcagattcaggcgacggccacggcggcgggcattgcgccgggccacatctttaccctgaccaacgcgccgttcttcagtgacaacggggagtatctggtgacggcggcgggttaccacttcgaggagaaccgctacgcgagcggtgagggggaaaccattcaccgcaccgatttcaccgttatcccggcgtcggtgtcctaccgtccggcgcagagcacggcgtggccgcgcacctacggcccgcagacggcgaaagtcgtgggaccgcagggggagagtatctggacggacaaatatggccgcgtgaaggtgaagttccactgggaccgcctggcgaagggcgatgacaccagctcctgctgggtgcgcgtgtcgagcgcctgggcgggccagggctacggcggggtgcagatcccgcgcgtcggcgatgaggtggtggtggactttatcaacggcgacccggaccgtccgattatcactggtcgcgtgtataacgaagccagcatgccgccgtgggcgctgccggctgccgcgacgcagatgggctttatgagccgcaccaaggacggttccgtggacaacgccaacgccctgcgctttgaggacaaggcgggtgcagagcaggtgtggatccaggccgagcgtaacatggacaccagcgttaaaaatgatgaaacgcacagcgtcggcggcgcgcgcagccattacgtgaagaaaaatgagctgcatcgcgtggaggctaatcagatccaggccgtgaaaggcggaaccgagatcctgacgggtaaaggcaagctggatgcggcggtagagcagtatgttattgcttccgggacgaagctgcggctggtctcgggcgagagtgctattgagcttaacgctaacggcaaaattaacctgatcggcaaagagttcaacttcttcgttgaaggggacggctatatcaccacgggcggcaagctgcacctgaatacgtcgggcacccaaccgggcacaacggcgccggggtcagggcataaaggggatattgatgcggcggtgcaggagaaatttacgcccccggaagagtaaccgctttctgtctgccgccgggttgtccgtggcggcacgtaaaaccctttagcaattttagacgcgagttcaccgatgaaatacaccctccaggaaggttcctttaccctttttcctgccgcctggcaggacaacagcatgaacatcattcgcgatgacgaaagcgggctgtccgtggtggtcagccgcggcgttatcccggatggcagcgactacgaacaagagtttcaccgccagtgggacgtgctgcgtcctcagatgggtgagatcgcccagagcgaatttcagcacgtaaaagccgggcctgccggcaacattgatggggtagaagttgagaccacctttgaccgtaacggccagcgcctgtggcaaaaacagctggccgtgcagacgccaggcaaaccggtactgatgatttttaccctctcggccttaaaagcctttacggaagaggacgaggcgcgctggagcgcactgaagcagagtctgacgctaaacgacaaccggaatgtgtaaggcatgagcgataacaacgcggcccgtaagggcgacgagattattcactccagcatttttgctgatattaccagcattgtggcggaaggcgctgcctatgcggtgattggcgcggcggtgggcgcggcagcgaccgtcgcggccccactgctgggagccggggccgcagcagcaggcgtggcggcgattggatccagctgtctgttgagcggcattattggtggggttctggcgaacgtcgccgggatcaccgacgatatcagcaacgccgctgaagggctgggtaacgcgcttttcccgccgtcgcccgcgggcaaaatcaccaccggttcgagcaatgttctgacaaataaacttcccgctgcacgcgccgccgggacgttaacgcctgccgataccccgtcccctgagccgcagtcgccgggcagctttgccgactacgcgggtatgctgctctccgctgccggacagttcggcagcgagatgtggcagcccagcgtcgcctctgccgccgcggggacctcgccgctggaagaagacaaggtggcgtgtgataaacactccgggccgcagtatctggcggaaggctcgaaaagcgtcttcatcaannnnnnnnnnnnnnnnnnnnnnnnnnnnnnnnnnnnnnnnnnnnnnnnnnnnnnnnnnnnnnnnnnnnnnnnnnnnnnnnnnnnnnnnnnnnnnnnnnnnnnnnnnnnnnnnnnnnnnnnnnnnnnnnnnnnnnnnnnnnnnnnnnnnnnnnnnnnnnnnnnnnnnnnnnnnnnnnnnnnnnnnnnnnnnnnnnnnnnnnnnnnnnnnnnnnnnnnnnnnnnnnnnnnnnnnnnnnnnnnnnnnnnnnnnnnnnnnnnnnnnnnnnnnnnnnnnnnnnnnnnnnnnnnnnnnnnnnnnnnnnnnnnnnnnnnnnnnnnnnnnnnnnnnnnnnnnnnnnnnnnnnnnnnnnnnnnnnnnnnnnnnnnnnnnnnnnnnnnnnnnnnnnnnnnnnnnnnnnnnnnnnnnnnnnnnnnnnnnnnnnnnnnnnnnnnnnnnnnnnnnnnnnnnnnnnnnnnnnnnnnnnnnnnnnnnnnnnnnnnnnnnnnnnnnnnnnnnnnnnnnnnnnnnnnnnnnnnnnnnnnnnnnnnnnnnnnnnnnnnnnnnnnnnnnnnnnnnnnnnnnnnnnnnnnnnnnnnnnnnnnnnnnnnnnnnnnnnnnnnnnnnnnnnnnnnnnnnnnacacgctcacggtccgcgatatcaaaagcggtaaaacgccgggtctggcgctggggatgattgcgctctccctgctgcgcgggcgtccgggcaagatcctgaaaaacatgccctgcgcgctggctgctgccggtggcgggatgctggctgatatggccgtcaacgccgtgttcggctcctcgcacccggttcatgccgctaccggcgtgaaggtgctgaatgacgacgacgaactcgatttctcgctgccggggcgctttccactgcgctggcagcgcagctacaacagcctgaccacccgcgaagggctgtttggtctgggctgggctaccacctttgacagctatctgacgctggaagaaaacaacgccacctggttcgatgaaaccgggcgcgagctgagcttcgagctgccgccggtcgaccgcgcgttttacagcatcagcgaaggcattatcatccgccgcaatgagagcggcgacgtggcgatagccgacgatgacggcgcggtgtggcgtctgtataaaccgacccgcgctaacccctccatcctgcgcctggtctccctcagcgacgaatacggcaacgcgttgctgacggagtgggatgaacacggcaggctgattggtatccatgatgagccgcgggcgatcgatgtcaccctgcgctatgacgatgaacgtttcccgcagcgcgttacctcggcgagccattttgacggcaaccagacatggccgctgatgcagtgggggtacgacgcgcgcggccagctggccagcgcaacggatgcctccggcgtggtaacccgtgaataccgttataacgatgatggcctgatggtctggcaccgtctgccgggcgggctggagagcgaataccgctggcaaaaattcgaccactggcgcgtggtggaaaatcgcaccagcaccggcgacggctgtcgctttacctacgatttagccgccgggctgacgaccgtcgatcactacgacggtcagacgcgaaagcattactggaacgcgcaaaacctgattgttcgctacgttgacgagcgcggtgagaactggcgctacgagtgggatgacaacgaactcctcacgcgtcgcatcgatccgctgggtaatgccgttaccttcgtctatgacgagatgggcaaccgggtgcaggagatcgacgccgatggcaatacccgcaccaccacctggctggagcaccgtgcgcttccggcgtccatcatcgaagctgacggtagcgccacccggttcctgtatgacgaacatcacgggctgaaacgcgtggtggatccgatggggcagaccacgctgctgcgtcgggacgagtttggtcaggttgtggaagaagttgatgccgccgggaacaaccgctaccaggagtacaacgaagccgggcagatggtgcgtgcgacggactgttcgggccgtgtgacacaataccgttatcatccgctgggctggctggtggctgagataagcgccgacggcgaagagacgcgttaccgctacgacgccgcggggcgtccggtgcagctcgaccgaccagaaggctggactgagtcgctcaaatggaacgaacgtggtctgccggtgaagcatgcgggcgccgacgggaaagagagcgagttcagatacgacgaggcagggcgcttaaccgccacccgtaatacacagggtgaagaggtgcgtcgccgctgggacagccgcgggcgtctgattgccctggaaaacgaaaacggcgaagcgtatcagttccgctggggcgcagactcgctgctgctggaagaggtggggctggatggcgtggcctcgcagtatcgctacgatgcctgcgggcgtacgatagcgcgcacctttgccgccggacatccggaggccattacccatgccttcgcctggagcgcgagcggccagctggtcgcccgcaccacgccggaggggcagacccgctaccactacaccccgtccggccttctgagccggattgggctgcatcccgcgctttcagaagatgcctggagcgccgaggccgagcaggagcttgtgtttgagtatgacgcgctcgggcgcgtcacgcgcgaaacgggcgaacacggagagctggcgtgggagtatgatgcgctgggcaaccgcacttccgtcacgctgcctgatggccgggagctgaaacagttctactacggcagcgggcatctgctcagcatcgcgcttgataagctgtcggtctccgactttacccgcgacgaactccaccgtgaaaccagccgcacccaggggctgctaaccacacgcagcgaatatgaccgtcttggccgactgcatcgccgggacgtctttaccggcaatgcccagcgcccgtcgccgcgccgctggtcccgccgctgggattacgactatcgcaataacctggtgcgggaagagcgggacgataacccgttcagctggtaccgctggcagtatgacagcgccggacgtctgctggttcaggacggcacgctgcccggccaggagcagtggcgctgggatgctgccggtaacccgctcgaaggctctgctgagaaggtcacgcacaaccgcctgacgcagctgaacggcattcgctggcgctatgacatccacggccgcaccgtnnnnnnnnnnnnnnnnnnnnnnnnnnnnnnnnnnnnnnnnnnnnnnnnnnnnnnnnnnnnnnnnnnnnnnnnnnnnnnnnnnnnnnnnnnnnnnnnnnnnnnnnnnnnnnnnnnnnnnnnnnnnnnnnnnnnnnnnnnnnnnnnnnnnnnnnnnnnnnnnnnnnnnnnnnnnnnnnnnnnnnnnnnnnnnnnnnnnnnnnnnnnnnnnnnnnnnnnnnnnnnnnnnnnnnnnnnnnnnnnnnnnnnnnnnnnnnnnnnnnnnnnnnnnnnnnnnnnnnnnnnnnnnnnnnnnnnnnnnnnnnnnnnnnnnnnnnnnnnnnnnnnnnnnnnnnnnnnnnnnnnnnnnnnnnnnnnnnnnnnnnnnnnnnnnnnnnnnnnnnnnnnnnnnnnnnnnnnnnnnnnnnnnnnnnnnnnnnnnnnnnnnnnnnnnnnnnnnnnnnnnnnnnnnnnnnnnnnnnnnnnnnnnnnnnnnnnnnnnnnnnnnnnnnnnnnnnnnnnnnnnnnnnnnnnnnnnnnnnnnnnnnnnnnnnnnnnnnnnnnnnnnnnnnnnnnnnnnnnnnnnnnnnnnnnnnnnnnnnnnnnnnnnnnnnnnnnnnnnnnnnnnnnnnnnnnnactacaatctgttccggtattacgacccggactgcggaaggtttacgcagcaggacccgatagggctggcgggagggattaacctttaccagtatgcgccgaacgcgctggggtgggtggatccgtgggggttgagccgaaaatgtaaggatccttctaaagaagcgactcaatggcaaggccctcataataaagactataaaggaatcgatagttactcgaacagaacgcttaaaaaaggaacagtcctttatgcattacatccaaatggtgatcagttaccttcatataccgtaactcatcctacagttaggcaatataaaggtgattcattaggatatcatgaagcgttacaggtgaaacttaatccagatttcccattgcgaacaaaggttagggcatattatgtttctgaggatatatttgttgctagtggtcgtgctaatgcgaatccgcaatacggaaaaggtggagggatgcaattctatatacctgaagaagcacgtagtaaattaattcctggcaaggtgatagatatatgaaaaaaatgacattaaattttaaagatggaagcattaaaattgatggctactcgattgaacttagttcttttgaaaattttacttcttctgaattttacaaagcccattctgaattcactaggataggtaaattttattttgcgaaagatgatattgaatgggaagggcagaactttattgtggagtttagaccagctgttttttcatttaattcatctctttttcttacaagtaaagatggggatttctatcaaacacttaaagattgggaacttagagcatcgttaaaaaaccttaaagatgaagaaagaagactgacagactggattcaaaataaactttccaaagagaaaatggtaaagataagtacccccccttatggagttacatggaactttgaatggggtgagctaacagtgcaatcaaatgaaagatcctttgattgcggtatatacatagaatggaaagattaaaatttagtataaatggagaattatagggtagcgcagcagactccaacaaggcttgcgtatgaacaatgccagaattcccaatcaagaaacattgttccatgaaaggccttgcaaaccctaaaattgaatctgaaattatctcctttgttgaagtttcacgatgataaaaaatatgccgtggctttagagcaataccaaaaaaactggcaagctctccctgagcgaaagttcgaatgggagcccaaccggttttctgcctgcatgtatagtgtttattttgttctcactactatgctgaggcaaagaaatgggggaagacgacaatgcggaccagtggatcgggtatagtaacggcatccttaatcgatcacggcatggtcttttaggagtacaatcaattcgaggaagcgtataaatattttaacgatgcttataactacggcaaagagcgtgcgtttcaggatagacctaaaaaatatctagagttctatctgcgcaaaagggataagttcgttactctataaaaaaatcaaacattacgcgtggatccgactacgccaggtaggtcgtatgaattaccatcaatatgggcagaatggcttgaagaagtagcgattccaggctccgggaatgtaagataggttactatatgaatatcaataaagatgacgaactccttgtgatagttaagtatgaaggaagattttattggttcgttgcgttcaaggaaatgtgggtcttagacagagtaaaatgggtagaggattttgtgaaaagtggggtggaaataaacctacagaatacccataaggaaagatatgacataccagttgtaaatgaagaaaacgcgcagatattcattgatgatttaattaaagatggctattcatacgataaggatgacattgctgaggagttttataaaaggctttcgcaaaaaaacaatttggtgggatatatatgaacttatgccggatttatttatagactttgataataaaagattatattcggaatatgttgagactatgcattatcaagaatatgttcctgatggttggcaaggtgaacttgttgatttttgcagtaatggatcgttacctcaagatgaaatgttctggataaaaaatgaaactgatcatagaagcgttttgatcgctaaaggataaaatatattttcggcaaaccatttttagacaatgcaatggtcgattcaatacgccaatttgtgtttgtgttaagcgagacaaagccgttaccaaccgttttgaccatcttcaacgctcagggtgaaaaactattttggtctgcatctcctgaaggtgctattttctattacttaacattaaaccagtcaaaggaagtggttgatgtatgtaattttacagtaatactaaatggctggcataattggttttattcttgggatatgaagcgtaacgcgttgtctagatcaggaccttcgtactaaattcacattttacattaaaattacagcgacaagagtgcctgaaactggcgtacgcaaagggggtatacctgctaaaggtgggagacttgcctgaccagcagagcgtttacaccagcacccttttcagacgttaaaatttgcgactgccgacatcattctctttaccatgtaaaaaaaatccacgcccaagcggggttttttcccattaaaaacaactcaaaggttaaacaagaagttcatcacatcgccatctttaacgatgtaatctttcccttccgcacgcatcttgcctgcttctttcgcgccttgctcacccttgtaagtgatgaagtcttcaaacgcgatagtctgcgcacgaataaagcctttctcgaagtcggtgtggattttaccggccgcctgaggcgcagtcgcacctacagggatggtccacgcacgcacttctttcaccccagcggtgaagtaggtttgcaggttcagcagctcatagcccgcgcggatcacgcggttcaggcccggctcttccagacccagctcggccatgaactcttcacggtcggcgtcgtccagctcagcgatgtcggattcaacggcagcgcaaaccgccacaactacagaaccttcagccgcagcgatttcacgcactttgtccagatacgggttgttctcgaaaccgtcttcgttaacgttggcgatgtacatggtaggcttcagggtcaggaagctcaggtatttgatcgccgctttgtcttcgtcagtcaggtttttcagcgcgcgcagcatgcccgcgttttccagctgtggcagacatttttccagcgcagccagttccgctttcgcgtcttggtcgccgcctttggctttcttctgcacgcggtgaatggcgcgctcgcaggtgtcgaggtcagagagggccagctcggtgttgatgacgtcgatgtcgtcagctggatccactttattgttaacgtggataatgttgtcgttctcgaagcagcgcacaacgtggccgatcgcttcggtttcacggatgttggtcaggaactggttgcccaggccttcacctttggatgcgccttttaccaggcccgcgatgtccacgaactccatggtagttggcagaatgcgctgcggcttcacgatttccgcgagctggtccagacgcggatcgggcataggaacaacaccggtgttcggctcgatggtacagaacgggaagttcgccgcttcaatacctgctttggtgagcgcgttgaacagggtggatttgcccacgtttggcagaccgacgataccgcatttgaatcccatttctaaatcaccttaatatcttgataatcaatccgttaacgataaccgattgaagaaaagtaaataactacgcctattatacacgtaacccgcgcgacgcgcggtaaaaaagccccagggcgccgattattgcgctttgaaagcgtgcagtcgattggtggcttttgtcaggccatcctgaagccaaatctcggtgcagcgggccgcttcgtccaccgcttcgtcaatcaacttctgctcagaaaccggtggtttacccagtacgaaaccaacaactttgtttttatcgcccggatggccgattcccacgcgcaaacggtggaaattagggttattacccagtttgctgatgatgtctttcagaccattgtggccgccatgaccgccgcccagtttgaacttcgccacgcctggcggcaggtccagttcgtcgtgggccaccagaatctcatccggattgatgcgataaaacgttgccatggccgccacggctttgccgctcaggttcataaaggtggttggcaccagcaaccgcacgtcagcacccgcaagattgatgcgtgaggtatacccgtaaaacttgggttcttcacgcaggggagcgcgcaaacgctccgccagcagatcaacataccaggcgccggcgttatggcgggtagcggcatactctgcgcccggattggcgaggccgacaatcagtttaatcgtcacgatttacttcctaatgggttccagatctggcgcgtagtttactgtctggcgcgccgcttgacaaagttctgcctgctgtacaccgaaatgcgaataatttcctctttgaataattagaatttcaagctgttcaatgtcttatttgtaaatttttgtccgggagtgatcagtaaatgtgatcattcacgcaactcatataagaggcgttgtctatactttacacacaaggagaaggggcttttcccctgacaacccaaagttccggaggtgacatatgaaacgcaaaaacgcttcaatgctcggtaacgtgctaatggggttgggactgttcgtgatggtcgccggtgtcggttattcaatcttaaaccaattaccgcagcttgacctcccacaatactttgcgcatggcgcggtgctgagtatcttccttggtgcggtattgtggctcgccggggcgcgcgtgagcggacatgaggaagtctgcgataaatactggtgggtgcgccattacgataaacgatgccgccgcgaccagcgcaagcatagctagtgccccataaagaacaccgaaacgacttcatctgaagtcgtttttttttgcatgacgcattgaccctcacgtaacgtaaggctccagagtaacgacactgnnnnnnnnnnnnnnnnnnnnnnnnnnnnnnnnnnnnnnnnnnnnnnnnnnnnnnnnnnnnnnnnnnnnnnnnnnnnnnnnnnnnnnnnnnnnnnnnnnnnnnnnnnnnnnnnnnnnnnnnnnnnnnnnnnnnnnnnnnnnnnnnnnnnnnnnnnnnnnnnnnnnnnnnnnnnnnnnnnnnnnnnnnnnnnnnnnnnnnnnnnnnnnnnnnnnnnnnnnnnnnnnnnnnnnnnnnnnnnnnnnnnnnnnnnnnnnnnnnnnnnnnnnnnnnnnnnnnnnnnnnnnnnnnnnnnnnnnnnnnnnnnnnnnnnnnnnnnnnnnnnnnnnnnnnnnnnnnnnnnnnnnnnnnnnnnnnnnnnnnnnnnnnnnnnnnnnnnnnnnnnnnnnnnnnnnnnnnnnnnnnnnnnnnnnnnnnnnnnnnnnnnnnnnnnnnnnnnnnnnnnnnnnnnnnnnnnnnnnnnnnnnnnnnnnnnnnnnnnnnnnnnnnnnnnnnnnnnnnnnnnnnnnnnnnnnnnnnnnnnnnnnnnnnnnnnnnnnnnnnnnnnnnnnnnnnnnnnnnnnnnnnnnnnnnnnnnnnnnnnnnnnnnnnnnnnnnnnaaaggagccgttatgttgatacaggtgggtgaactggcgaaacgtgccgggatcaccgtgcggactttgcatcactacgagcaaacagggctgttgttaccttctgccagaagcgcggcaggctaccggctttataacctggcggatgtgcagcgtctgcatgtgatccagacgctggcaaaagccgggctggagcttgccgaaatcagggattttctggaacagcgttcgctgtcattagccgaattactcgacgggcaaatcactctgctggacaagcaactgcgtagtatccatacgctgcgcaaccggctggtggagttgcgtaccgggctgaccgacgatgcgacgccggatctggaatcctggctacagactctggagttaatgaatatgtacgatcgctggtttagcaaagaagagttgcagcaactgccgtttgcggtagagaaagaggcgctggcggatatctggtcggggctggtgacggaggttaaacacttgctggaacagaacgtcagcgtcacggacgcgcgggcgaccgatttggcttcacggtggatggaacgcctggagcaggataccgcaggcaaaccggaatttttgacccgtctgaacgagatgcacagcgtggagccgcagatgcaggagcaaaccggcattacgccggagataactgattacatcacgcgggcgtttgccgaatcaaagctcagcatctgggagaaatatctcactgccgaagagatggcctttacccgggcgcactactttgaccggatgatggagtggccgccgctggtggcgaagctgcatcaggcgcagcaggataatctcagtcccgcttctgacgatgcgcaaaagctggcagaaaagtggctggttttattccagtcctatgcaggaacaaacccgcagacccagcaaaaatttcgcctcgccatgcagcaggagccgcatctgatgaaaggcacgtggatgacgcctgccgtgcttgaatggctccagcaggcgatcggggtgatgatgcaaagacgagtctctgcatcagatgactcacagatccgctaacgcagcttcacggttagggtagaaggacaatcggccagggatcggctgcacgcccgcgcgcgccatggtgcgcaggggctggaattcaaggttacttatccgcagctcgcagccttccggcaggcgggcaacaaagcgctggaaggcatccagaccgccggcatccagcaccgggacggcatcccatttcagcaccacaatccgtttgcccgcaatgcgggattccagatcgctgaacaaaccttccgctgcggcgaagaacagcggaccaatcacgcgcagcaccagcacatcgtcaggcacctcaacgttaaccggggagagacgcgtcatctgcgcgatgcggcgcataaacagcagcgaggccagcacaatgccgacgctgatggcgataaccatatcgaacagtacggtcaacgacatgcagatcagcatcacgataatgtcgtctttcggcgcacggcgcagcaggttaaccaccttatgcgcctcactcatgttccaggccaccatcagcagcagcgcagccatggccgagagcggaagccatgaaagcagcggggcaaggatcagcagcgccatgatcaccagcagggagtgaatgaccgccgaaaccggtgatgtcgcgcccgcacgtacgttcgcggcggaacgggcaatcgcagccgtagcggtaataccgccgaagaacggtgcaacgatgttccctaagccctggccgaccagctcgctgttggctttgtgcttagtgccggtcatgccgtcgagcacgacggcgcagagcagggattcaatcgcgcccagcattgccatggagaacgcggcaggcagcagagcgcgaagggaatcccagctcagggtaaagctggaacccggcatgtcccacggcagaaccagctgcggcagcagctgcggaatgccgctgccctgtgagccgtccgccagaacatagtggaactgggagccaatggtggcgacctgtccaccgagcaggttgacaacgcccatcaccgcgcagcccagcagcagagcgggcagatgccccgggagacgaatgcctaagcgaggccagacgataagtgtgccgagggtaacgatgccaatggccgcatcgcccaggttggccgtcggcaacgccataaacagcgcgcccactttctgtaaatagtgctccggaacatgggccatttgcaggccgaggaaatccttaatctgcatggtcccgatggtaatcccaatccccgaggtgaaccccagcgttacggaaaggggaatatattcaatcaggcgaccaaagcgggccagaccaaacagaattaaaaaaatgccggacatcagggtggcaaccagcaggcctgccagaccaaactgttgggaaaccgggtagaggatcaccacaaaggcggcagtcgggccggagacgctgaagcgagacccgcccgttagcgcaatcacaatccccgcaacggccgaggtgtacagcccgtactgcggcgcgacgccgctaccaatcgccagcgccatcgccagcgggatggcaataatcccgacggtgatcccggctatcaggtcaccaacaaagcgtgacgatgtgtatttctctttccagcaggcgtcgatgagggcgcgaaagggcagaacatgtgaggaggttacgtttttcacaattatctatcatccgtgtgcgcatcatctgtcatatgaatggcaggtgaaggaggcataaatcatacaaataaatactataaacaaaaaaacccgccgtagcgggttttttggccgtgttcgatcagtgttcgaacattgcagagatcgattcttcgttgctgatacgacgaatcgcttcggccagcatcccggacagagtcaacgtacgcacgtttggcagcgctttgatctcgtcgctcagtggaatggtatcgcagaccacaacttcgtcaatgacggagttacggaggttgtttaccgcattgccggagaagatcgggtgagtggcgtaagcgaatacgcgtttcgcaccacgctctttcagcgcttcagcggctttacacagcgtaccgccggtatcgatcatgtcgtccaccaacacgcagtcgcggccagccacgtcaccgatgatgtgcatcacctgagaaacgttagcgcgtggacggcgtttgtcgatgatcgccatgtcggtatcgttcagcagcttcgcgatagcacgagcacgtaccacgccgccgatgtccggagaaaccacaatcgggttgtccagattcagttgcagcatgtcttccagcaggattgggctgccgaatacgttatcaaccggcacgtcgaagaagccctggatctgctctgcgtggaggtcaaccgtcagtacgcggtcaacgccgacgctggacaggaagtcagcgacaactttagcggtgattggcacacgcgcggaacggacgcgacggtcctgacgtgcatagccaaagtaaggaataacagcagtgatacggccagcagaagcacgacgcagcgcgtcgaccataacaaccaattccatcaggttgtcattcgttggagcacaggtggactggatgatgaaaatatcaccaccgcgtacattttcgttaatttgtacgctgacttcgccgtcgctaaagcgacctacagcggcgtcgccgagggaagtgtacaggcggttggcaatacgttgtgctagttccggggtggcgttaccagcaaaaagcttcatatcaggcacgagaagaacctcaggcatgcgtccagtggtggatagcgttcgccgcaaactgcggggcctaagcaaacgctatccaggcggtgtattaaagagcgcgatgcaacgtctggaacagggtgacgttgtcaccgaaactcagtctgcgccagaatggcctgctgtaggggggaggtgttcatcccgcgtgctacaaaaccatgcagccaaaccggcgcttgctcaagcacctgacgggcggcggtttcggtgtcaaattcagcaaagacacaggcccctgttccggtcaggcgcgacggcgcgtattctaacagccaggaaagcaccgcatcaacctcgcgaaaacgttttcttgcgatatcctcgcaatcgttgctgaattcacaatttaataacgtttttattgaccgtgccggggtatttcttttcaggtcaggatctttaaagatgaccggggtaggaatgctcacgccggggtgaacgatcagataccatttttccggcggatcgaccggcgtgaggatttcaccgacaccttcagcgaacgccgcgtggccgcgcacnnnnnnnnnnnnnnnnnnnnnnnnnnnnnnnnnnnnnnnnnnnnnnnnnnnnnnnnnnnnnnnnnnnnnnnnnnnnnnnnnnnnnnnnnnnnnnnnnnnnnnnnnnnnnnnnnnnnnnnnnnnnnnnnnnnnnnnnnnnnnnnnnnnnnnnnnnnnnnnnnnnnnnnnnnnnnnnnnnnnnnnnnnnnnnnnnnnnnnnnnnnnnnnnnnnnnnnnnnnnnnnnnnnnnnnnnnnnnnnnnaggcgggcagcgcgcacgatcaggttatcgtcatgcgccacgccgtcgaccggcgtcagcaggcaaatctgcccgtcctgacgcggttcgatggagatggtgtcgccgtaatcgacaaactgaaacagcgtttgcagggtgtgatagccgtcagcgcgctgcccggtaatgtagagaaacaggttcagttttgcgggagagggccagtgggtcatcatttaacgatccagttgtccattttcagcttgatacgctggctaccctgcgtcagctccatattggacggcagcgacggttgcgtcttgctgtcatacgcgctgtacaccactttccaggttttaccgccctgggtgtagttcacctggctcagacggtattgatcgtcgagcgtatagtcggttgcgtcacccggcaggccgaggatccactggcgcagactattgagcggaatcggcattccggtcagcttgccaatcatctcttcggcgtcggttgccgtgtagtgctggcctttgttatcggtgatctgcgcttcgccaggcttcgcgttaagctccagctcggtgctgcccagcgggttcagcagcagcaggcgatagttgtcctgacccgtttgctgccagaagaagcgagcataaactttttgttcgtcagagagataagcaaatgcaccgcgggtctggtactggcttaatttcagcacgtcctgctggtgctgacgccactgcggtgagtcagggcttttgcccgggcctttcggctgatgaacggaacaggcggtcagaaccagggccgccagaggcagcaggcgaatcattcgggtcataatgatgacaaatccttgagatacgttgcagttataactgttaatgctagcgttgaagggtgccaccgtctacgttcaaattatctcaaagcgtggcgtaagctattactccgaaagggggcagtctcttttattgatctcgcgcatcctgtatgatgcgtcctgctaaccttattaacgctggtactactcccgctcaacatgaccctattagcactcggtattaaccacaaaacggccccggtttcactgcgagaacgcgttacgttttcgccggatacgctcgacctggcgctggacagcctgcttgcacagccgatggtgcagggtggcgtggtgctgtcgacgtgcaaccgtaccgagctgtatttgagcgtagaagagcaggacaacctgcacgaggcgctgatccgctggctgtgtgactaccacaacctcaacgaagaagagctgcgcaacagcctgtactggcatcaggataacgatgcggtcagccatctgatgcgtgtggccagcggtctggattcgctggtgctgggcgagccgcagatcctcggccaggtgaaaaaagccttcgcggattcccagaaagggcatctgaaagccagcgaactggagcgaatgttccagaagtctttctccgtggcgaagcgtgtgcgaaccgaaaccgacattggcgccagtgcggtttcggttgctttcgcggcctgtacccttgcccgtcaaatttttgaatccctgtcgaccgtcaccgtactgctggtgggagcgggcgaaaccatcgagctggtggcgcgccatcttcgcgaacacaaggtgaagaagatgatcatcgccaaccgcacccgcgaacgtgcgcaggtgctggcagatgaagtgggcgctgaggtgattgcgctgagcgacatcgatgaacgtctgaaagaggcggacattattatcagttctaccgccagcccgctgccgattatcgggaaagggatggtcgagcgtgcgctgaaatcccgccgcaatcagccgatgctgctggtggatatcgccgttccgcgtgatgtcgaaccggaagtgggcaaactggcgaacgcctacctgtacagcgtggatgacctgcaaagcatcatttcgcacaaccttgcccagcgtaaggcggcggccgtgcaggcggaaaccatcgttgaacaggaaaccagcgaatttatggcctggctgcgcgcgcaaagcgtcagcgagaccatccgcgaataccgcggtcaggcggagcaggtgcgtgatgacctgacggccaaagcgttagcggcccttgaacagggcggcgacgcgcaggcgattatgcaggatttagcctggaaactgaccaaccgcctgatccatgccccaaccaaatctcttcagcaggctgcccgtgacggggacgatgaacgcctgactattctgcgcaacagcctcgggctggaatagcgccctatacccattttctaagacaaggtgcatttacgcctatgaagccttctatcgtcgctaaactggaagctctgcacgagcgccatgaagaagtccaggcgctgctcggtgatgccgggaccattgccgaccaggaacgttttcgcgcgctgtcgcgtgaatacgcgcagttaagtgatgtttcaaaatgctttaccgactggcgacaggtccaggaagatatcgaaaccgcgcagatgatgctcgacgatcctgagatgcgcgagatggcgcaggaagagttacaggatgcgaaagcgcgttcagaagagatggagcagcagcttcaggtgcttctgctgccgaaagatccggatgatgagcgtaacgcctttgtggaagtccgcgccggtaccggtggcgacgaagcggcgctgttcgccggggatctgttccgtatgtacagccggtatgccgaatcccgtcgctggcgcgtggagatcatgagcgccaacgaaggcgagcatggcggctacaaagaggttatcgccaagatcagcggcgacggcgtgtacggtcgtctcaagtttgaatccggcggtcaccgcgtgcagcgcgtgcctgcgacagaatctcagggacgcattcatacgtcagcctgtacggtggcggtgatgccggagctgccggaagcggaactgccgnnnnnnnnnnnnnnnnnnnnnnnnnnnnnnnnnnnnnnnnnnnnnnnnnnnnnnnnnnnnnnnnnnnnnnnnnnnnnnnnnnnnnnnnnnnnnnnnnnnnnnnnnnnnnnnnnnnnnnnnnnnnnnnnnnnnnnnnnnnnnnnnnnnnnnnnnnnnnnnnnnnnnnnnnnnnnnnnnnnnnnnnnnnnnnnnnnnnnnnnnnnnnnnnnnnnnnnnnnnnnnnnnnnnnnnnnnnnnnnnnnnnnnnnnnnnnnnnnnnnnnnnnnnnnnnnnnnnnnnnnnnnnnnnnnnnnnnnnnnnnnnnnnnnnnnnnnnnnnnnnnnnnnnnnnnnnnnnnnnnnnnnnnnnnnnnnnnnnnnnnnnnnnnnnnnnnnnnnnnnnnnnnnnnnnnnnnnnnnnnnnnnnnnnnnnnnnnnnnnnnnnnnnnnnnnnnnnnnnnnnnnnnnnnnnnnnnnnnnnnnnnnnnnnnnnnnnnnnnnnnnnnnnnnnnnnnnnnnnnnnnnnnnnnnnnnnnnnnnnnnnnnnnnnnnnnnnnnnnnnnnnnnnnnnnnnnnnnnnnnnnnnnnnnnnnnnnnnnnnnnnnnnnnnnnnnnnnnnnnnnnnnnnnnnnnnnnnnnnnnnnnnnnnnnnnnnnnnnnnnnnnnnnnnnnnnnnnnnnnnnnnnnnnnnnnnnnnnnnnnnnnnnnnnnncaacccggcagatctgcgcatcgacaccttccgctcatcaggggcaggtggtcagcacgttaacaccaccgactccgctatccgtattactcacctgcccaccgggattgtggttgagtgtcaggatgaacgttcccagcacaagaacaaagctaaagcgttatccgtgctgggcgcccgtatccacgcggcggaaatggcgaaacgccagcaggcggaagcctctacccgccgtaacctgctgggcagcggcgatcgtagcgaccgtaaccgtacctataacttcccgcagggtcgcgtaaccgaccatcgcatcaacctgacgctctaccgtctggatgaggcgatggaaggcaagctcgatatgctgattgagcctatcgtgcaggaataccaggccgaccagctggcggcactgtccgagcaggattaatggattttcagcgctggttacgccatgccgccagtgagctttctgcaagtgaaagcccgaagcgcgacgccgaaattctgcttgagcatgtgacgggtaaagcccgcacgtatctgctggctttcggcgaaaccgcgctgaccgctgaacagcaatcgcagctggaggcgctgcttgcccgccgtaaaaccggcgagccggtggcgcatctggtttgcgagcgcgagttctggtcacttccgctgtacgtttcagcggccacgctgatcccgcgcccggacaccgagtgtctggtggagcaggcgctggcgcggttaccggcgcagccgtgtcagatcctcgatctcggtactggcaccggcgcgattgcgctggcgcttgccagcgagcgaccggactgcaccgtgacggcggtagacgtgatgcctgatgcggtcgccctcgcgcggcgcaacgttgaacggctggggctgaacaatgtttccgttctgcaaagcagctggtttgccgcgcttgaaagccgcatgtttgaaatgattgtcagcaatccgccctacatcgacgaagacgatccgcatctcgcgcagggcgacgtgcgttttgaacctttgaccgcgctggtcgctgcgaatcagggacttgcggatctcgatcacattgtgacaacgtcacgacaacatttgcttcccggtggctggctgctggtggaacatggctggacgcagggagaggcggtgcgagcgctgtttacgcgtgccggatacgctgccgtggaaacctgccgggattacggcggcaatgaacgtctgacgctggggcagtggtcatgagcctgtttacgctgctgatctccgttcacctgatttccgttgccctgaccatcggctttttcattgcccgctactggtggcgctacagcaacaatccgctgattaacgcccgctgggtacgcatcgccccgcactgtatcgacacggtgctgttcctttccggagccgggttaatgtggaaaaccggctatctgccatttactgataaagacgcatggctgactgaaaagctgtttggcgttatcatctacatcgttttgggttttatcgcgcttgggcgttatcgtccgcgcagccagcagacagggtttatcgcctttttgctgggtctggtggtgctgtacatcatcattaaactcgccaccactagaataccgttactggggtaagtcatgaggtccttagccgatttcgaatttaacaaagtgccgctctgcgatggtatgatcctgatttcagagatgatccgcgacgattttacgtcacagtacgtttacgctgaactggagaatctggtcagcctggcgcgcgaagagatcaatcaggcacgtccgcaggactggcaattagagaagctaattgagcttttctacggcgaatggggtttctgcgacacgcgaggcgtgtaccgcctgtctgacgcactgtggctggaccaggtgttgaaaaatcgtcagggcagcgccgtcgcgttgggcgccattttactgtgggttgcgcacgagctggatattccactggtgccggtcattttcccgacgcagatgattttgcgggcggagtggctggacggtgagatgtggttaatcaatccgtttaacggcgacacgctggatgagcatacgctggacgtctggctgaaaggcaacatcagcccgatagctgagctgttcaatgaagatcttgatgaagccgataacgccgaagtgatccgcaagctcctggatacgctgaagtctgcgctgatggaagagcgtcagatggagctggctctgcgcgcaagcgaagtgctgttgcagttcaatccggaagatccgtacgaaatccgcgaccgcggcctgatttatgcgcagctcgactgcgagcacgtggcgctgaatgatttgaattatttcgtcgagcaatgtccggaagacccgattagcgagatgatccgcgcgcagatcaacgcgatcgcgcataaacacattacactgcattaatcttaattccgattcacacctgaataaggcgatcctatgaaacaaaaagtggttagcattggtgatatcaacgtggcaaacgacctgccgttcgtgctgtttggcggtatgaacgtgctggaatcccgcgatctcgctatgcgcatctgcgaacactacgtgaccgtgacccaaaagctgggcatcccgtacgtgtttaaagcctcttttgacaaagccaaccgctcctccattcactcctaccgtggcccgggcctggaagaggggatgaagattttccaggagctgaaacagacgtttggcgtgaaagtgatcaccgacgtgcacgaagcgtctcaggcacagccggtggctgatgtggtagacgtgattcagcttccggcgttcctcgctcgccagactgacctggtagaagcgatggcgaaaaccggtgccgtgattaacgtgaaaaaaccgcagttcgtgagccctggccagatgggtaacatcgtcgacaagtttatcgaaggcggtaacgaccaggtgatcctctgcgaccgtggttcaaacttcggttatgacaacctggttgtggatatgctgggcttcaccgtgatgaagaacgtctctaaccagtctccggtgattttcgacgtgacccactccctgcaatgccgcgacccgtttggcgccgcatctggcgggcgtcgtgcgcaggtgaccgaactggcccgcgccggtatggcaaccggcctggcgggtctgtttattgaagcgcacccggatccggctaacnnnnnnnnnnnnnnnnnnnnnnnnnnnnnnnnnnnnnnnnnnnnnnnnnnnnnnnnnnnnnnnnnnnnnnnnnnnnnnnnnnnnnnnnnnnnnnnnnnnnnnnnnnnnnnnnnnnnnnnnnnnnnnnnnnnnnnnnnnnnnnnnnnnnnnnnnnnnnnnnnnnnnnnnnnnnnnnnnnnnnnnnnnnnnnnnnnnnnnnnnnnnnnnnnnnnnnnnnnnnnnnnnnnnnnnnnnnnnnnnnnnnnnnnnnnnnnnnnnnnnnnnnnnnnnnnnnnnnnnnnnnnnnnnnnnnnnnnnnnnnnnnnnnnnnnnnnnnnnnnnnnnnnnnnnnnnnnnnnnnnnnnnnnnnnnnnnnnnnnnnnnnnnnnnnnnnnnnnnnnnnnnnnnnncatattgccgggtggcgctgcgcttacccggcctacaaaacccgtaggccctgcaagcgaagcgccgctgggcaaaaaggctacgcaaatatcgtcatcagatacgcaataaacagcgccatatgcgccgcgccgttcagcacattggtgcggccggtggagaaggatatctggcacagcagcaaggatgccaccatcacaatcatctctggcgcacccagcgcaaactgcaattcatttcccgtcataaaggcaatcaacgtcaccaccggaacggtaagggagatggtcgccagaacggagccgaagaacagattcatcgcccgctgcacctgattattgagcaccgctttcagcgctcccaggccttctggcgacaggatcaacagggccaccaggaaaccggtaaaggcgaccggcgcgttcagttcagttaacagcgcctccagcgggttcgcattcatcttggtgacagcaataacggcaatcagatgcacgatcagccaaaccgtatgccacgcgctgctgtgcgccgacggcttaccgtgatgcgggtcatcgtcgtcgccgtcgtcttcatgctcgtaaacaaacaggctctggtgcgttttggtctggatcagcaggaacacgccgtacatcgccgcggaaatcagcgccaccagcagcgcctggccggtggtgaaatttgcacccggcagcgccatcgggaacaccagcacaataatcgccagcgggaacagggcgatcaggtactgtttaatgccaaagaggttcatgtactgggtggcaaatttgcgaccacctaataaaagtgaaaaaccgaccaggccgccggtaacaatcataatgatggagtagagcgtatcgcgcattagcgttggcgcggcgtcgccggtggccattaatgcggaaattaaactgacttcaagaatcacaaccgaaaggcttaaaattaatgacccatacggctctccaagacggtgggctaacacatccgcatggcgtaccacgctaaatgcactggttaaaatacccaccagagccagaatattgatccccacaaccactggcaatgactgactgcttccccagaagagcagcacagccagtgccagaaccgggaaaatgagagaggtctccttgtggcgggtttttaccgcctcgtgtgttgctgtcatgtgtttctccaacaatgcaggtgcttgtaattatagatagattttaaaggtattaaattaacagaaatctgttaaataccctgtattttttacttaattttaccctttattataatttttatgtctgaggcttataatgccttatctctgttaaatattagtttaataacaatgaattacatttttatattgttcatttctttctgtcgagtggcaccctcgcgtatcgtcgtccacacttatcttttagccaaaagagaggttaacgatgccatacaaatcgaaaagcgaattaccggataacgtgcaaaacgtattgcctgcccacgcccaggatatctacaaagaagcctttaacagcgcctgggatcagtacaaagataaagaagatcgccgggacgatgccagccgtgaagagacggcgcataaggtggcctgggccgccgtgaaaaatgactatgagaaaggggacgatgataaatggcacaaaaagaaatagccgccaaataacacgctgcctccattttgacatttcaggcggttgacctgccgctgtattgcatctggcccgcgaattgcttatcgttgctcaactgctgttaaaatgaacagcacagaatgccgggaaggcgaattacagatgtcgcaaggaagcatgcagtggcggaggtggaatgtgttaacgcgtgatttcttgatgaaggcagattgtaagacggcatttggtgctattgaggaatcgcttctgtggtcggctgaacaacgtgcggcgtcgcttgcggcaacgctggcctgccgcccggatgatggcccggtctggatctttggttacggctcgctgatgtggaacccggcgctcgaatttgttgaatcagcaaccggaacgctgcctgggtggcaccgcgccttttgtttgcgcctgaccgccggacgtggcagcgcctgtcagcctggccgcatgcttgcactaaaagagggcgggcgcaccacgggcgtggcataccggctgccggataccacgctggaagatgagctgacgctgctgtggaagcgcgagatgatcacgggctgctatatgcccagctggtgcaagctggaactggatgacgggcgcaccgtcaacgcgctggtgttcattatggatccgcgccacccgctgtatgaagccgatacccgaacccaggtgattgccccgctgattgccgccgccagcggaccgctgggcactaacgcccagtaccttttctcgctcgatcaggagctgacgcgtctcggtatgcaggacgactgtctgagtgagctggtggtgaaggtgaaagcgctgctggaagggaacccgctcagcaatacgctgcggccgggttttgcctgataatacgcccggctgaccgggcgtttacggttatgccgccacgtaacttacggaatgttcgagcgactggctgtggctgtcgatcagcacatcccaggtgccggtgtaaggcaccgtcagccaggccttatcgtcctggacggtaaggatatctgcctgcgattgcttctgtccttttgtactcatcagatggatgcggcaacgctctgagcaacgcaccactaccgtatccccgccaaacagtttcagactcgttttaactcgtgccattttataccccgtcgtttttgcccatcccgagcgtgatgttgttcacaatttactcattgcataacaccaaaggggcaggggtgggatgctgatttcgatcaaaaaatggcgcaacgattaaacaaaaatgacaaaatccctgaaacctttcagcggacgcgcgtttaccctgcttaacgcgcgcccgggaaaaattatatgcggaaatggccagcggtctcagcaaggtcgcctgcctggctttgcagcgcgctggccgccgcagcagactgtacaacaagttcggcgttctgctgcaccatgcgatccaggtgagtcaccgcgtggttaatctcatggatccctttcatctgctcgcgggtggcaatggatatttcacgcataatgcctgacacgctcccgacgctggcgcggatctcatccatgctgtcgcccgcaaggtgcacaaaccgggagccggttgcaacgctttcggtggtggaatcaataagggatttgatctccttcgccgcctgagcactgcggctggccaggttacgtacttcccccgcaacgaccgcgaacccacggccttgctccccggcacgcgccgcttccaccgaggcgttaagcgccagaatattggtctggaaggcgatgccgtcaatgacgctggtgatatcgccgattttcgcggaagccagttcgatggactgcatggtgctgatggcctgagcgacgacgtcgcctccgcgggatgcggcggctgaggccttgctcgcctgttcgttcgcttctgctgccgactcgtttgactgcgtaacggaggccgtgatctcttccacggcgctggcggtttcgcgaaggcttgatgccgcctgctcggtacgcccggaaagatcctgattacctgacgcaatctcatgcgcggcgtttttcactgaggcgctggcatcacgcagctggaccatcaccacagaaagcttatcgctgaaggcgttaaacgcctgcgcaatttgcgccacttcatcgccccccttatccggcagacgctgcgacagatcgttagtaccgttggcaatgctgttcatcgcgtcacggataccggacagccgcttaagcaggcgggcaatcaggaggtgcatgagggctccgctcagcagggcgaggatcgccagagacagtgcagatgcttttagcaatgaccgcatcccggcggtggcatcgccgttatcgagcgccacaaccagcagccagtgccgtccccggtacggcggtggccaggaacgttttttcgcgtccgttaaacgttccgtcaaccaggttgccgcttttcaggggggcaaaatcggtccctttgatcgtctccgtaaaaggcttaagcgtcagcgcaggatcgctgccggcaataacggtgccgttgctgtccagaagcagtccgctgctggccggagtcgggtgaataccgcgcacgttagccaccacgctgtccatcgccacatcgcccgccaccactgctttcagggcgccttgctctttaaccggtaccgcgaacgtcaccaccagtttcccggtgcccgcgtccacatagggtgcagtcactaccgggccatcagcgctgacggcctgctgataccacgggcgaagggtgggatcgtaatcagcgggtaccccggttgggtcagaaaatttagccgttttgctggcataacccacgtagacgttggtgaatccacccgccagcgcaagctgtttaaacaccggaaccggatcgtcgctgagcgcgactggctgcgccgaggtgatgacggtcattttgttgttcacccagtcggcaatcgccatgttgtggctggcgctggtgctggtcagaatatcgcgctgcgactgctgattatcctggcgcgtgacctgaaagttgataatggtattaagaagaagggcgacgaccagacagcctgtcgtcgcggcaatgatgcgggcgcgaatggatctgaacataagtgtaatacctgctgtgttgtttccatgcctatcggcaacggtgcaggtaaacttgatgctgaaaccgcgtccataagaaaataatatttttagcgggttattattaaaaagttaatactttatcggcggaaagcgtccattcagccagctccaccagcgtaccaatttccacgccatcaatcagcggcagcccggtaatgccgcgcccgtcggtacaggttttgcacagtttgaccggaacgttttgcgcggtcaggatctccagcatttgttgaatgttgtagccctctgcgggtttctgccccttcagcccggccgtgacggcatcggacatcaaaaagaggcgcagctccagctcactctccttatcgcgcagcgcgattgccaggcgcaggctgttaaaaagggattcactgccgtaggccgcaccgttggcgacgatcacaatcttctgcatgttgactcctgttctttgaaaaggcacgaatattgcttctcgtaccgaagaatacgtatcggggagagaaacgatgacgatagtggctggcagttcccctggcgcaaccgaatggttccagcgtgcgagaatgttgcgcgaggaacagctcggcagactggcgcagctgggcgcactggtgaacggcatcagtcgactggtgcatatgctacagtgcgagcgcggtgcgtcaaatgtctggctctgctcgcagggcaaattgtacgcgcctgaatgcaaggccagcagggccctggtggatgaaaacctcgccgcattgcaccgtctgtttaacgaaccgctgccgggcagcgccctgtgcgaacgtattgccagcgcactgcacggccttgagacgctaacggtgctgcgtgatggcgttacaggtcaacgcgtcaccgcgccgcaggcgatggaacactacagccgcatactgcgtcatttgctcagtatcgtacctcaactcagcgacagcattgacgatccgcacatcgcgggccgatttgtggccctttacagcctgatgcagggcaaagaacttgtgggacaagagcgggcgctgggggctattggtttcacccagggattctttgacgatgaaacccgccagcggctggtggatcgcattgatggccagcaggcctgctttgaggtttttatctcccattgcactccagacgtgcaggagacgtttatcctcaactgccagccgggtctggagactgaaaaactcaggcgtgaagcgtgcacccgccagcctccggcagataacggcgataccgccctcaaatggtttgccctgcaaaccacgcgccttgagcacctgcgcacgctggaggaggtggcaattgccgatctgatgacggcggttgaggagcgccgctatagcgaaaacctgcactcagacgatgaacacgacgatatcctggcgcgatttccggataaaccgctgctgccgctggtgcgccagcaggcgcgtgaaattgagcaactctcccgtcagcttgcttccctgcgcgacacgctggaggagcgtaagaccatcgacaaagccaaaagcgtgctgatgacgcaccagaacatgagcgaggagcaggcgtggaccgcgctgcgcaaaatggcgatggataaaaaccaacgcatggtggatatcgcccgtgcgctgcttacggtgaaaaatctgtggaagataccccctggggagtagttgcacagtcagtgggcattttatgcctgattgaggtgcgtaaaacagcgctcttcttgcagaaaccccgtaacgccggggatgaaaagctggcattacctttgcattaacagattaaccattttcgacgatgcgccaacggcggtgcatgcgtcttcgggataaaggcgtccagcggtgcttcagcaccgtcgggcgcttttttttgccttttttcaggagcaattatggcggatttgtcgagacggcggttattgcaggccagcatgctggcgagtggtgcgatgctgttgccgggtgtcatgcaggccgcatgggcggcggggtcagataagccggagcaggataccgtgcgtatcgggtttatccccctgaccgactgcgcacccgtggttatcgcggccctgaaagggttcgataaaaaacacggcattaccattgtacctaccaaggaggcgagctgggcggcggtgcgcgacaagctggtggcgggcgagctggacgctgcgcacattctttacggcctgctgtacggtctggagctgggtatcgcgggcaagccgcagcagatggcgaacctgatgaccctcaaccagaacggtcaggccattacgctctccagcgatctggcggagaagggcgttcgtgacctcgacgggctgaaaaagctgattgcgcagcaggcgccgggaacctacaccttcgcgcataccttcccgacgggaacgcacgccatgtggctctactactggctggccagcgcggggattaacccgtttgacgacgtgcgcaccgtggtggtgccgccgccgcagatggtgatgaacatgcgcattggcaacatggtcgggttttgcgtcggcgagccgtggaacgcgcgggcgattaacgaccgaatcgggtttaccgccgccacgtcgcagtccatctgggccgatcacccggaaaaaatcctcggcacccgacgcgactgggtggcgaaaaatccgcacaccgcacgggcgctggtgagcgccgtgatggaagccgcgcgctggatcgaggcgtcagcggaaaacaaacgcgaaaccgcgcagatcctctcgcgccgcgcctggctcaactgcaaggaacagtatctcaccggacgcatgctcggcgagtacgacaacggggtcggtcagcgctggcaggatgcgtacccgatccgtttcttcaacgagggtgccgtgagctatccgtatctctccgacggcatgtggttcttaacccagttccgccgctggggcttgctcaacgccgcgccagattacgcgggcattgcacagcgcattaaccagaccgcggtctggcaggatgccgcgaccgccgtgggcggcatgtccacaccgtcatcaccgtatcgcagcagcaccctgatggacggcaccgtctggaacggcaccgatccggaagggtacgccaaccgcttcgccattcaccgtaaaggggcctgagtatgcagcatctgcaaaatacaaaaccacaagagacgtcagagagcggggaagtgattgtcctgcctccgctacaggttcgccgtcgtacgccagcgtttacgcgtcggatgaatgattttttacagcgcgtcatcccggcgctgctcggtctcggcctgctggtggtgctctggcagctggcggcgataaacagtaaaggctttccgacgccgctcagcacgcttgattcggccatgaccctgtttgccgatccgttttatcgcgacgggccaaacgatatgggcattggctggaacgtgctggcgtcgttgcagcgcgtcgccatcggcttcggtctggcagcgatggcgggcattccgctgggctttttgattggccgcttcacctttttctcgcgcatgttcaacccgctgatcgcgctcctgcgtccggtcagcccgctggcctggctgcctatcggcctgctgctgttccagaaagcggagcctgcatcgagctggaccatttttatctgctccatctggccgatggtgatcaacaccgctgaaggggtacgccgtattccgcaggactacctcaacgtggcccgggtgttgcaactctcagagtggaccatcatgcgccgcattcttttccccgccgtgctgcctgcggtgctgaccggggtacgtctttccattggcattgcctggctggtgattgtcgccgccgagatgctcaccggaggtttaggcattggattctggatctggaatgagtggaacaacctcaacgtcgaaaacattctcatcgccatcgtcatcattggcgtggtcgggttgctgctggagcaggggctgatgctgatcgcccgtcgctttagctggcaggaaaaataaggagtgaagatgaaaccgttaattcaggtccaggccgtgagccagcgtttttccaccgccagcggcgagtttctggcgctgcaaaacgtctcttttgatatccacgagggcgaaaccgtcagtctgattggtcactccggctgcggcaagtcgacgctgttaaacctgatcgccgggatcacgctgccgacggaaggcgggctgatttgcgacaaccgcgaaatcgccgggccggggcccgagcgcgcggtggtgttccagaaccattcgctgctgccgtggctgacctgcttcgacaacgtggcgctggcggtggatcaggtcttccgtcacaccatgagtaaggccgagcgcaaagcgtggattgagcacaacctcgaccgggtgcagatgggccacgcgctgcataagcgccccggggagatctccggcggtatgaagcagcgcgtcgggattgcccgggcgctggcgatgaagccgaaagtgctgctgatggatgagccgtttggcgcgctcgatgcgctgacgcgtgcccatcttcaggactcggtgatgcagatccagcaggcgctgaacaccaccatcgtgctcatcacccacgacgtggacgaggcggtactgctctctgaccgcgtactgatgatgaccaacggccctgcggccaccgtgggtgagatcctgcgcgtcgatctgccgcgcccgcgcaacagggtgcagctggcggatgacagccgctatcaccacatgcgccagcagatcctccatttcctctacgaaaaacagccgaaagcggcgtaatgagggggcacgatgcgactggtcattatcggtaatggtatggcggcaacccggctgattgcgtcgctcaccgggcgtgttcccggtcgtttcgctatcaccgtcatcggtgacgagcctgagcaggcgtacaaccgcatccagctttcaccggtgctgggtggcgaaaagcaggcggagcacatctgtctgcacgatgaagactggtacacggcacgaggcgtgacggtgctgcgaggagaaaaggcgctcgcagtagacgtcaacgcgcgtgaagtgcatacctctgctcgcacgctgggctgggatgcgctggtgtttgccaccgggtctacccctgtagtgccgccgatccccggcggcgatgcaccgcatgtgttcacctttcgcaccctggcagagacccgcgccatccagaatatctccgggccggcggtagtgctgggcggcggcgtactcggcgtggaggcagcggcagccctggcgcgaaacggtgacaacgtcacgcttatccatcgcggcacgtggctgatggaacagcagctggatcagcaggcgggactgctgcttgacgaggcgctggcgaagcggggcgtacgctgtgaactcgcctccggcatcacggccatcgctgacgatgccgtgacgttgctcgacggacgccgcatcgccgccacgcgcgtggtgctggctacgggtgtacagcccaacgtcgcgctggcaaaagccagcggcattcgctgcgcgcgcggcatcgtggtggatcagcagatgcaaacctccgtgccggatatctacgccatcggcgagtgctgcgaaattgacggccagacgtttggcctggtcgccccctgtctggcgcaggcggatattcttgccgcgcggctggccggggaggtcaccgcgccgtttaccctgaccgacaacggcgtgcgccttaagatgaccggcgtggcgctgttcagcctcggacgcgcgacggcgcaggcggacgatgtggtctggagttcatgggacccgctgacccgtcactatcgacgtttactgatccatcagggggcgctggctggcgtgctgctgatgggtgactgccgcagcgcggcaacctttaccgatttactggcaacggctgcgcccgcccacgcggactggctgttcgatcgtttcacaacgcaaccgcaggttgcaggacagaacgctatgacaaaacctactctggtggtggttgggcacggtatggtcggccatcatttcctcgaagactgcgttaaccgcaatttgcatcagcagtatcagattattgtttttggcgaagagcgctatgccgcctatgaccgcgtgcatctgtcggaatattttggcggacgcagcgcggactcgctctcgctggtggcgggggcgttctttgccgataacggcattgagctgcgcctctcgcagcagatcgtcgctatcgatcgtgatgcacacgtagtgcgtaccgccagtggccatgagactcactgggacaagctggtgctggcgaccggctcgtacccgttcgtaccacccgttccgggcaacgatctgccgggttgttttgtctaccgcaccctcgacgatctggacaacattgcggcccatgcggcaggctctcgccgcggcgtggtaattggcggcggcctgctggggctggaggcggcgaatgcgcttaagcagctcgggctggaaacccacgtggtggagtttgcgcctaacctgatggcggtgcagctcgacagcgacggcgcggcaatgctgcgtaagaaaattgaggcgctgggcgtaggggtacacaccagtaaatcgacgacggagattgccaccgcagacgacgggctggtgctgcgctttgccgatggtgaacagctggaaacggacatggtggtcttctctgccggtattcggccgcaggacgcgctggcgcgcagcagcgggctggctgtcggcgagcgcggcgggatctgcattgacgacggctgccggacctccgatccggatgtgcttgccatcggggaatgcgcgctgtgggaggggaaaatctttggcctggtggcaccgggctaccagatggcgcgcgtggccgccgctgtgctggcgggtgaggagaagcgcttcaccggcgcagatatgagtaccaaactcaagttgctgggcgtggatgtggcgtcgtttggcgatgcccacgggcgcacgccgggcgcgctgagctaccagtggacgcacgggccgcagcaaatctacaaaaagattgtggtcagccacgacagcaaaaccctgctgggtggcgtgctggtgggcgatgccagcgaatacgccacgctggtgcagatgatgctcaacggcatcagcctgccaaaagagccggaaacgctgatcttacccgtatcgtcaggcagcgcgccgaaagcgctgggcgtggcggcgctgccggaaagcgcgcagatctgttcgtgtcataacgtcagcaaaggggatatctgccaggcggtaagcgcgggcgcaacggatatcggcgccattaagcagtgcaccaaagccgcgaccggctgcggaggctgtagcgcgctggtgaagcaggtgatggagttccagcttgcagcgcagggcgtggaggtgaaaaaggatatctgcgaacacttcccgtactcgcgtcaggagatttaccacctggtgcgcgtcaaccatatccgcaccttcgaccagcttatcagccgctacggtcaggggcatgggtgcgagatctgtaagccgctggtgggatcggtattggcttcctgctggaacgagtatctgctgaaaccggcgcatctgccgttgcaggacaccaacgaccgctatttcgccaatattcaaaaggacggaacctactccatcgtcccgcggatgcctgcgggtgaagtgaccgccgacgggctgatcgccatcggccagatcgcgaaacgctatagcctttacagcaaaattaccggcgggcagcgtattgacctgtttggcgccacgctcgaacagttgccggaaatctggcaggcgctggtagaggccgggtttgagaccggacatgcttacgggaaatccctgcgcacggtgaaatcctgcgtcgggtcgacctggtgccgctacggcgtgcaggattccaccggcctcgcggtcaggctggaacaccgctacaaggggctgcgcgcgccgcacaaaatcaaaatggcggtctccggctgtacccgtgagtgcgcagaggcgcagagcaaagacgtaggggtgattgccacggacaaaggctggaacctctatctgtgcggcaacggcgggatgaagccgcgccacgcggatctcttcgccagcgatctggacgacgaaacgctgatccgcaccgttgaccgtttcctgatgttctacattcgcacggcagatcgtctgcaacgcaccagtacctggatggataacctggaaggcggcctcgactatctgcgcgaggtgatcctcaacgacagcctggggatcgcccacgagctggagcaggagatggcccgggtggtggagacctaccagtgcgaatggcaaaccacccttaacgatcctgaccgcctggcgctgttccgcaccgcggtgaacgtccccgccgcggaggagaacaagcgctggcaggaaatttgtaatatcgacgagatcccggagcaggcgggcattggcgcgcatcttgggcgcaaaccgattgcgctgttccgctttggcaaaaccgtttatgccctcgacgatcgggagccgggcagccgcgcgaacgtgctttcacgcggcatcctcggcgatgcggcgggggaaccggtggtgatctcgccgctctacaagcaacgtattcgtctgcgcgacgggtgtcaggctgagagcggggcgcctgcggtgcgtgcctggccggtaaaaattgaaaacggcaaggtgtgggttggaaatgaagagctggtgatgcgtgcggaggcctcatgacggaaacccggacaacgtgcccttactgcggggtgggctgcggcgtggtcgccagcgcagacggtgaaaaggtgagcattcggggggatgaaactcatccggcgaatttcggtcgtctgtgcgtaaaaggatctgccctcggggaaaccacggggctacagggacgcctgctgcgcccggttgtcgatggccgggaggtggcatggccgcaggcgctgggcgaagcgggcgagcggctgcggaacatcatcaacgaatgggggccgcaggcggtggcgttttatgcctccggccagctgttgaccgaggattactatgccgccaataagctgatgaaaggctttatcggggcggcgaacattgataccaactcgcggctgtgcatgtcatcggcggtggtgggctacaaacgcgccttcggtgaagacgtggtgccgtgcagctacgaggacgtggaaaacagcgatctggtggtactcgttggctcgaacgcggcctggacgcatccggtgctgtatcagcggctggtgcaggcaaaacacaacaatccgcagatgaaagtggtcgtgatcgatccgcgtaaaaccgccacctgcgatatcgccgatctccacctcgcgctcagacccggcagtgacgccgggctgtttgtggggttgctcaatctgattcaggggcgcggcgagtggccgatccctcgcgtggcggcgttttgcgatctgccttcagacgagattggcaccttctacgactggtttgtcaccgcgccacgcgcgatcacgctctacaccatggggatcaaccagtcctccagcggcagcgacaagtgcaacgccatcattaacgtgcatcttgccagcgggaagttcaaccgtcccggctgcggcccgttttcgctgaccggacagccaaatgccatgggcgggcgggaagtggggggactggcgaatcagctggcggcgcacatgaacttcgagccggacgatctcgcgcgcgtggcgcgtttctggggaacggaacggctggcgcagaccccgggcctgatggcggtggaactgtttgacgccattgcccgcggcgaggtgaaggcggtgtggatcatgggcaccaaccctgccgtttcacttcccgacagccacgcggtgtgccaggcgctggcggcctgcccgctggtcatggtatctgaggtgatgcaggagacggacaccagccggtttgcccatatccgttttcccgccctgggctggggcgagaaaaacggcacggtgaccaattctgaacgccgtatctcccgccagcgcgcctttctgcctgcgccgggcgaggccagaccggactggtggatcatcgcccggatcgcagagcagctcggttatggcgatgccttcgcctgggaacaccctcaggagatattttgtgaacatgcggcgctaacggcgtttgaaaataacggcgaacgggcgctaaacctgcgcgaactggcgtcgctgtcgcgagaggcgtgggacgcgctggcgccgtatcagtggcatgccggtgatttcccgcaaagaacgcttgttccggttgacccctccccgcatggggcaggcgtcgacgaattgtaccccttgatactgaataccgggcggatccgcgatcagtggcacaccatgacgcgcacggggtatgttccgcgtctgatgcagcatatcgatgagccttttgttgagatgaacgcaaccgatgcggcgcgcgccgggctgactgacggccagctggcgcgggtaagctccccgcgcggagtgatggttgccagagtacgtatctccaccgcgcagcgtgcaggcgagctgtttgcgccgatgcactggaacgcgcaatttgcccgccagggtaaggtcaatgcgctggtggaagggcgggttgatgccgggtccggccagccggagagtaaacaaaccgcggtgaggatcatgccctggctacccgcctggcagggtgaactgtatgcccgcgagctgccagcgctgccgccgtcggtctgctggtggcgtaaagcctcacgtctgacggtggcgggggagcagccgttgctgtcgtggatcatggcgtacgccagcggtcggggctggcagttacaggtggcacagacgggagaacgcagcagcgtgctcgcctggcatcacggtgagctgatgctgggctactgggagggccatacgctgccggcgctggcgcatgcgtttattgaagaagcctttgctgctgcgcccgtccaacttgctgaacgccatgcgctgctgcacgggcaacggccggacgaagatgccgatcccgggcgaattatctgtagctgcttcagcgtgggtgaaaatacgatacgtaaggcaatagccggaggctgtgattctgccccagcgctgggcgtgaagctgcgctgcggcacgaactgtggttcctgcgtgccggagctgaaagcgctgttgggataatagtgtaagggcgtcgggtggcggcttcgcaccggtacgaatttgtaggtcgggtaaggcgaagccgccacccgacaaatcttttcaggatattcctgaaatttctcttaagactggttttcagggcttatggcgttaacataataagtgtttgttcataaacacaggttctgattgacgacgttgaaggctgtatcgtcccgcatccgttttttgctgttactccccctttttacggctggagccgttcatggtgcgccgaaatccttcgtgcagcaggcgcaaaatccgtttgataacaacggcgatagtctgccagatctcggcatggcgcaaccgaccagcgaaggcgaaaagcatctggctgaaatggttaaggccttcggtgaagccagtatgaccgataacggcctgacggccgggcagcaggcgcgacagttcgcgtttggcaaggtgcgggatgccgtgagcggggaagtcaacgagcagattgaatcctggctttcaccctggggaaacgccaacgtcaatgtgctggtggatgacgacggcaactttaacggcagcagcggaagctggtttatcccctggaacgacaacacccgctatctgagctggagccagcttgggctgacgcagcagacagacgggctggtgagtaacgtcggggcaggtcagcgctgggttgccggaaactggctgctgggctacaacactttttacgacaacctgctggaagacaacctgcaacgtgccgggctgggcgcagaggcgtggggtgaaaacctgcgcctgtcggccaattactaccagccgttcgctggctggcagccgcgttccgacatccgcgagcagcgcatggcgcgcggatacgacgtaacggccaaagcctggcttccctggtttcaccacctgaacaccagcgtcagctttgaacaatattttggcgataacgtcgatctgtttaacagcggtacggggtatcacaacccggttgcggtcaacctggggctgaactatacccccgtaccgctggtcaccctgacggctgcccataaacagggggagagcggcgttagccagaataacctcgggctgaagctcaactatcgttttggcgtgccgctggcgaaacagctttccgccggggaagtggcggcgacgcgctcgctgcggggcagccgctatgattcacccgatcgcgataatctgcccgtgatggaattccgtcagcgcaaaaccctctcggtatatctggccacgccgccgtgggatcttaagccaggcgaaacggtgatgctgaagctgcaaattcgcagcacgcacggtatccggcagatccactggctgggtgatacccaggcgcttagcctgacctcaccggcaaacggcaacagcagcgatggctggagtgtgatcatgcctgcatgggatgattcggaaggggcgaaaaatacatggcggcttacggccgtggtggaagataaggatgggcagcgtgtctcctccaatgagatcacgctttccgtggtgcaaccgctcgtcgcaatgcctgccgacgatccacggtggaagttgctgccggatgagtaagttaaaaaatgcgctcctgatgcacccagacggcggcttcgacgcgggattttaacttcatttttttcagcatgtgtttgacatgcactttgaccgtgctctcggtgatgtccagacggcgggcgatcattttgttcggcagcccctgggcaatcagcttcagaatgtcacgctcgcgcggggtcaactggctgacgtcacgatcagacgtggcgcggttcgcacgcaggctggcggccagtaccggcgttaacgcttcactcagcaccatctcgcctgcggcagcctgttgcagcgccttgagcagatcttccggctccatatctttcagcagatagccgtctgcccctcgcttgagggcggtgaccacgtcttcttcatggtttgagacgctgaagaccaccacccggccagagagggatttctcccgcagcttgtcgagggtttccaggccattcatgcccggcatgttgagatcgagcaagatcaaatcaggatcgagcgattcggcaagttcaataccctgttcgccgttactggcttccccgacgacggtgatatctggcgccatgctgacaagctgtttaacgccagtgcgcagcatcggatgatcgtcaatcaacaggatagatgccggttcctgattagtcatggttttctccttgagcagttatgaggggcttttcgggtataaaggtgaccacaacttcggtgccacctgactctccccggcgaacctggcaatcaccgcgcaggctttgcgcgcggtctcgcataataattaaaccatagtggttcgttcgttcggcattttccggcacgccgcggccgttatcctgaaccctgagcttcacctgattatcctggcagctgacggtgaccgtgacggccgtcgcctcggcatgcttgagcacgttgctcagggcttcgcgggcaatttgcagcaagtggatcgcctggtgagaggggacaaaacgcggtggcagctggtaatccagcttcaccgggaagcccagccgggcgctaaactcctgacagctggattccagcgcagggcgcagccccggctcggtgagctgcaaacggaaggtggtcagcagctcgcgaagctgaatccacgaggtgttaagctcgttgcggatctggctgagcagctgtttgctgctctcgggcatgccttcatcctgcatttgcaggcagctcacctgcatcttcatgcaggagagggactgggcgatggagtcgtgcagctcgcgggcgatggtggcacgctcctccatcacgatcagctgctgctgtttctcctggtggcggtcgagcgccagcgtggccgtgagctgctcaacaannnnnnnnnnnnnnnnnnnnnnnnnnnnnnnnnnnnnnnnnnnnnnnnnnnnnnnnnnnnnnnnnnnnnnnnnnnnnnnnnnnnnnnnnnnnnnnnnnnnnnnnnnnnnnnnnnnnnnnnnnnnnnnnnnnnnnnnnnnnnnnnnnnnnnnnnnnnnnnnnnnnnnnnnnnnnnnnnnnnnnnnnnnnnnnnnnnnnnnnnnnnnnnnnnnnnnnnnnnnnnnnnnnnnnnnnnnnnnnnnnnnnnnnnnnnnnnnnnnnnnnnnnnnnnnnnnnnnnnnnnnnnnnnnnnnnnnnnnnnnnnnnnnnnnnnnnnnnnnnnnnnnnnnnnnnnnnnnnnnnnnncagcaaaataccgtactgggtatggctgtccatcagccgccacttgagggtcgtgccgctggtggtaagcggcggcaagccgcgcgggcacagatgacaccctttatcgtcgcaggagatgtccgactgacaggtaaattcctgatggttttcctcatcttcaacgtcgtaaacccgaagctcaagatcgcggagcagagtcagattttgcaggccgttcagtaccggcgagagacgttcgcaaagcgggacctgcatatgcaggcgacggttcgcctgccagaggaaagagaggatctcgtttttctgctcaagcccggcggttttctcctggacgcgttgttccagtaccgcgtagctttctgatagctctgccgacatggtgttgagcgcctcgccgagcatcgccatttcgttgcgcccgctgatgtgcgtgcgctgggtaaaatcgcgctgtgtgacggcgcgggccatcgccaggagctgtttccagggattaagcaaccgcgcgcgtagccagataaccgtgaaaatcagcagcaaacccataaacagcgccattgcgcggtgaaccatcaccacacggtcaatgcgtaactcagtggtgcgatcgaatgaggagacaagatgatcgatgcgtgacacaaacccggcgacgtcccgggcgaccgtttcccggtcttccgcccgctttaacccaggctccagctgggtatgccagtagccctgaagcgccttaagctgagattgctggccgtcacggatggcggctctttccagttcagggctgaatgcggtacgctccatttcgtcgataagcggttggtcagcctgcgtcagcggcaccgacgccagcagccggtaactctgcatacgtagcgagcctgcctcgttgatggcatgcgcgttaccctgtacaccctgtaccagccagccagaaatagccatgccggtcacgccgatagcggtggacagcagaacaataagcgccagctggttaaccagcgtcagcggagataaacatctttttaacatagagttgccgggctcctgacgtgacctgattgcaggaatggcgctattctggtgcataccctggagtatacccataccaataaaggattacctctaaattgccagaggggtaacggttagtgggtggacgaagcagggatgcgtcagcaccgtgaaaaaccacaccttttttacgttttgcatctactcattaagagtgatggcttttttttcgtccgcaaaacctcccacttttcctttgatttatatcaacttaccgccgccctaaagccctaatgtttgcagcatcattcgagaatcagaggtgtctatgagtcactcttccgctcccgaaagggaaactggtgccgttattacagactggcgtccagaggatccggcgttctggcaacagcgcggccaccgtgtagcaagtcgtaatctgtggatttcggttccatgtctgttactggcgttttgcgtctggatgttgtttagtgcggttgcggttaacctgccaaaagtgggctttacctttaccaccgatcagctgtttatgttgaccgcgttgccgtcgctttcaggcgcactgctgcgcgttccttacgcgtttatggtgccggtctttggtggtcgtcgctggacggctttcagtaccgggatcatgatcgtaccgtgcgtgtggctcggttttgcggtgcaggatacctccacaccgtttagcgtattcgtgattatctctctgctgtgcggttttgcgggggcgaactttgcgtccagtatggcaaacatcagcttcttcttcccgaaagcgaagcagggtggtgcgctgggcattaacggcggcctcggtaatatgggcgtgagcgtgatgcagctgattgccccgctggcgatctctgtctccatctttgcggcctttggcggcggcggtgtgacgcagcccgacggttccgtgctgttcctgcaaaacgcctcctggatttgggtaccgttcctggtggtctttaccctggcggcgtggttcttcatgaacgatctgtccgcgtccaaagcgtcactgagcgagcagctgccggtgctgaagcgtggccacctgtgggtgatggcgctgctgtatctggcgaccttcggctcgttcatcggtttctccgcaggctttgccatgctgtctaaaacccagttcccggacgtgcagatccttcagtttgccttcttcggtctgtttattggcgcgctggcacgttcgctgggcgggatgatctccgaccgtctggggggaacgcgcgttacgctggtgaactttgttgtgatggccatcttctgtgcgctgttgttcctgacgctgcctgcgggtggtgaggggggtaacttctttgccttctttggcgtattcatggtgctgttcctgaccgccgggctgggcagtgcgtctactttccagatgatctctgtcatcttccgcaagctgaccatggaccgcgtgaaagcgcagggtgggagcgacgagcaggcaatgcgtgaagccgccaccgataccgctgcggcgcttgggtttatctctgcgattggcgcgattggcggcttctttattccaaaagcgttcggtatctcactggatctgaccggctctccggcgggtgcgatgaaaatattcctcgtcttctatatcgcctgcgtggtcatcacctggctggtatatggccgtaataccaagaaaaacaagtaagcttgattatccgtttgcgcggcctgagtgccgcgcttttttaaatcgctaaatagttacaacatactaatagtttttcctgtggtcatacgcaggtaacgctgtgatcgccatcgctttacaggtgtttctaccccttaatacctaagatgttaaattttgcctcgcttattgtacgataaataaaatatatctatataaatcataaagttaaaaaatattaatggctaccgctttggtggtatttgatctaataccccccctcagagtcccccttcgtcttgatcgttatcaattctcaccatctttcatagcgttaccttcgctgcaaatcagcaatgtcgatttagagagccacaggctccatacaggagatacccgatgagcaaatttttggaccggtttcgctacttcaaacagaagggtgaaacttttgccgatgggcacggccaggttctggataccaaccgggactgggaagacggttaccgtcaacgctggcagcatgacaaagttgtccgttctacccacggcgtaaactgcactggctcatgtagctggaagattttcgttaaaaacggtctggtgacctgggaaatgcagcagaccgattatccgcgtacccgtccggatatgccgaaccacgagccgcgcggctgcccgcgtggggccagctactcctggtatctctacagcgccaaccgtctgaaatacccgctgatgcgtaaacgcctgatgaaaatgtggcgtgaagcgaaagtgcagcacagcgatccggttgatgcctgggcctccattattgaagatgccgacaaagcgaaaagcttcaaacaggcgcgtggtcgcggtggtttcgttcgttcttcctggaaagaggtgaacgagctgattgcggcttctaacgtctacaccgtgaaaacctacggtcctgaccgtgtggcaggcttctcgccaatcccggcgatgtcgatggtctcttacgcctccggcgcgcgctacctgtcactcatcggcggtacctgcctgagcttctacgactggtactgcgacctgccgccagcgtcgcctcannnnnnnnnnnnnnnnnnnnnnnnnnnnnnnnnnnnnnnnnnnnnnnnnnnnnnnnnnnnnnnnnnnnnnnnnnnnnnnnnnnnnnnnnnnnnnnnnnnnnnnnnnnnnnnnnnnnnnnnnnnnnnnnnnnnnnnnnnnnnnnnnnnnnnnnnnnnnnnnnnnnnnnnnnnnnnnnnnnnnnnnnnnnnnnnnnnnnnnnnnnnnnnnnnnnnnnnnnnnnnnnnnnnnnnnnnnnnnnnnnnnnnnnnnnnnnnnnnnnnnnnnnnnnnnnnnnnnnnnnnnnnnnnnnnnnnnnnnnnnnnnnnnnnnnnnnnnnnnnnnnnnnnnnnnnnnnnnnnnnnnnnnnnnnnnnnnnnnnnnnnnnnnnnnnnnnnnnnnnnnnnnnnnnnnnnnnnnnnnnnnnnnnnnnnnnnnnnnnnnnnnnnnnnnccgaaacagggtaccgatgccgcaatggcgctggcgatgggccacgtcatgctgcgtgaattccacctcgacaagccaagccagtatttcaccgattacgtgcgtcgctataccgacatgccaatgctggtgatgctcgaagagcgtgacggctattacgccgcaggccgtatgctgcgtgccgcggatctggtggaagcgctgggtcaggaaaacaacccggagtggaaaacggtcgcctgcaacagcaacggcgagctggtggcgccaaacggttctatcggcttccgctggggcgaaaaaggcaaatggaacctggagcagcgtaacggcaccacgggtgaagagacggagctgcgtctcagcatgctgggcagccaggatgagatcgccgatgtcggcttcccgtactttggtggtgaaggttccgagcacttcaacaaggttgagttgcaaaacgttctgatgcacaagctgccggtgaagcgcctgcaactggcggacggttctactgctctggtcactaccgtctacgatctgaccatggcgaactacggcctggagcgcggcctgaacgacgaaaactgcgcgaccagctatgatgacgtgaaggcttataccccagcctgggcggagcagatcaccggtgtgccacgcgcccagatcacccgtatcgcccgcgaatttgcggaaaacgccgacaaaacccacggtcgctccatgatcatcgtcggtgccggtctgaaccactggtatcacctcgatatgaactatcgtggcctgatcaacatgctgatcttctgcggctgcgtcgggcagagcggcggcggctgggcgcactacgtgggccaggaaaaactgcgtccgcagaccggctggcaaccgctggcgtttgcccttgactggcagcgtccggctcgtcacatgaacagcacctcctacttctataaccactccagccagtggcgctacgagacggttaccgcccaggaactgctgtcgccgatggcggataaatcccgctacagtggccacctgattgacttcaacgtgcgcgctgagcgtatgggctggctgccgtctgcgccgcagctgggtacgaacccgctgcgtattgcggaagcggcgaagcaggcgggcatgtcaccggtggactacaccgttaaatccctcaaagacggctcaatccgcttcgcggcagaacagccggagaacggtaaaaaccatccgcgtaacctgttcatctggcgctctaacctgctgggttcgtccggtaaaggtcacgagtacatgctgaaatacctgctcggtaccgaaaacggtattcagggtaaagatctcggcaagcagggcggcgtgaagccggaagaagtggagtggaaagacaacggtctcgacggaaagttggatctggtggtgacgctggacttccgtctgtccagtacctgcctgtactccgacatcgtgctgcctactgccacctggtacgaaaaagacgacatgaatacgtcggatatgcatccgtttattcatccgctgtctgcggccgttgacccggcgtgggaatcaaaaagcgactgggaaatttacaaagacatcgcgaagaaattctctgaagtctgtgtagggcacctgggcaaagagaccgacgtggtgacgctgccaatccagcacgactccgctgccgaactggctcagccgctggacgtgaaggactggaaaaaaggcgagtgcgacctgatcccgggcgtaaccgcgccgcacattattccggttgaacgtgattacccggcaacttacgaacgctttacctctatcggcccgctgatggagaagatcggtaacggcggtaaaggcatcgcctggaacacccagagcgaaatggatctgctgcgcaagctcaattacaccaaagcagacggcccggcgaaaggccagccgatgctgaacacggcaattgatgcggcagagatgatcctgaccctggccccggaaaccaacggccacgtggcggtgaaagcgtgggcggccctgagcgagtttaccggtcgtgaccacacgcacctggcgcagaataaagaggaagagaaaatccgcttccgcgatattcaggcccagccgcgcaagattatctccagcccgacctggtctggcctcgaagatgaacatgtgtcctataacgccggctacaccaacgttcacgagctgatcccatggcgcacgctttctggccgtcagtctctgtatcaggatcaccagtggatgcgtgacttcggtgaaagcctgctggtttaccgtccgccaatcgacacccgctccgtgaaagcggtgatgggcgcgaaatcgaacggtaaccctgagaaggcgctgaacttcctgacgccgcaccagaagtggggtatccactccacctacagcgacaacctgctgatgctgacgctgtcgcgcggggggccaatcgtctggatgagcgaagcggacgccaaagatctgggtatcgaagataacgactggatcgaagtgttcaacagcaacggcgccctgacggcacgtgcggtggtgagccagcgtgtaccggccgggatgaccatgatgtaccacgcgcaggaacgtatcgttaacctgccggggtctgagatcaccgagcagcgcggcggtattcacaactccgtgacccgtattacgccgaagccgacccacatgatcggtggttatgcccagctggcctacggctttaactactacggcaccgtaggatcgaaccgcgatgagttcgtggtggtacgtaagatgaagaatattaactggttagatggcgaaggtaatgaccaggtacaggagagcgtaaaatgaaaattcgttcacaagtcggcatggtgctgaatctggataaatgcatcggctgtcatacctgctcagtcacctgtaaaaacgtctggaccagccgtgaaggtatggagtacgcctggttcaacaacgtggaaagtaagccgggcactggcttcccgaccgactgggaaaaccaggagaagtggaagggcggctggatccgtaaaatcaacggcaaactgcaaccgcgcatgggtaaccgtgccatgctgctgggaaaaatcttcgctaacccacatctgccgggcattgatgattactacgagccgtttgattacgactaccagaacctgcacaacgcgccggaaagcaaacaccagccgatcgcccgtcctcgctcgctgatcaccggtcagcgcatggacaaaattaccagcggtccaaactgggaagaaattctgggcggcgagttcgaaaaacgcgccaaagaccagaacttcgagaacatgcagaaggcgatgtacggccagttcgaaaacaccttcatgatgtatctgccgcgcctgtgcgaacactgccttaacccggcatgcgtggcgacctgcccaagcggcgccatctacaagcgtgaagaagatggcattgtgctgatcgaccaggacaagtgccgcggctggcgtatgtgcatcaccggctgcccgtacaaaaaaatctacttcaactggaagagcggtaagtctgagaagtgcatcttctgctacccgcgtatcgaagccggtatgccgaccgtctgctcagagagctgcgtaggtcgtatccgctacctcggcgtgctgctgtacgacgcggacgcgattgaaaatgtcgcaagcaccgagaacgagaaagatctgtatcagcgtcagctggacgtcttcctcgatccaaacgatccaaaggttattgagcaggcgctgaaagacggtattccgcagagcgtgattgatgccgcacagcagtctccggtgtacaaaatggcgatggactggaagctggccctgccgctgcacccggaataccgcacgctgccgatggtctggtacgtgccgccgctgtctccgattcagtctgcggcggacgcgggtgaactgggcagcaacggcattctgccggacgtggaaagcctgcgtatcccggttcagtatctggccaacctgctcaccgcaggggatacccagccggtactgctcgcgctgaaacgtatgctggcgatgcgtcacttcaaacgtgccgaaaccgttgacggcgttaacgatacccgcgcgctggaggaggttggtctgaccgaagcgcaggcgcaggagatgtaccgctatctggcaatcgctaactacgaagatcgtttcgtggtgccgagcagccaccgtgaactggctcgcgaggccttcccggagaaaagtgggtgtggctttacctttggcgacggttgccacgggtcagacagcaaattcaacctgttcaacagccgccgcattgacgcgatggatgtgaccagcaaaacggagccgcaccaatgattgaactcgtcattgtttcgcgtctgctcgagtaccctgatgctgcgcttgtgcagcatcaacaggaactctttgatgcactcgcgtcatctgaaaacctggataaaatggatgcccagaagctgggcgttttcctccgcgatctgctggcacgcgatcttcttgatgcgcaggcggactacagccagctgtttgaccggggccgtgccacgtctctgctgctgttcgaacacgttcacggtgaatcccgcgaccgtggtcaggcgatggtggatctgatggcccagtacgagcagcacggtttgcaactcgacagccgcgagctgccggatcacctgccgctgtatctggaatatctggcacagttgccgaaagaggaagcgctgggcgggttgcaggacattgctcccattctggcgttgctcggcgcgcgtctccagcaacgtgagagcagctatgcagtcctgttcgatctgctggtgaaactggctaacgcctcggttgacagtcaaaaagtggcggaaaaaattgcggatgaagcccgtgacgataccccacaagcactggatgccgtctgggaagaagagcaggtgaaattctttgctgaccagagctgtggcgaatctgaaatctccgcgcatcagcgtcgttttgccggagcggtggctccgcaatatttgaatatctctaacggaggacagcactaatgcacttcctgaatatgttcttctttgacatttacccgtatatcgcgggcaccgtattcctggtgggaagctggctgcgttatgactatggccagtacacctggcgtgctgcctccagccagatgctggatcgtaaagggatgaacctggcgtcaaacctgttccacatcgggattttgggaattttcgccggccacttcctggggatgctgaccccgcactggatgtacgaagcgtggctgccgattgaagtgaagcagaagatggcgatgattgccggcggcgcctgtggcgtgatgaccctggtgggtggtctgctgctgctgaaacgacgtctgttcagcccacgcgtgcgggctaccacgaccggagcggacatcctgatcctctccctgctgatggtgcagtgtgcgcttggtctgctgaccattccattctctgcgcagcatatggacggcagcgagatgatgaagctggttggatgggcacagtctgtcgtgaccttccgcgggggcgcttctgagcatctggacggcgtggcgtttatcttccgcgttcacctggtgctgggtatgaccctgtttgtgctgttcccgttctctcgcctggtgcacatctggagtgcgccggtggagtacctgacgcgcaaatatcaggttgtgcgtgctcgtcgctgattcgctgtattaatacaaccccgcatttgcggggttttttttgtccccgatccaggggggcgtgcggatgccgggtggcggctgcgccttacccggcctacagaccctattcgtagccccggtaagcgaagcgccaccggggaaaacaggcagggaaggattactcccggcatcgagaaatatggagcattgtgcttgagtgagtgcttaagaatctggaagtgatggtggtgggggaaggattcgaaccttcgaagtcgatgacggcagatttacagtctgctccctttggccgctcgggaaccccaccaggggtaattcatattttgaggtaaagctggagatggtggtgggggaaggattcgaaccttcgaagtcgatgacggcagatttacagtctgctccctttggccgctcgggaaccccaccacggggtaatacttttaactggcctgcttcctgttggaagcggggcgcatcatatcaaatgagacgcccctgtaaagcattcctttaggaaaatgaagctgtttgcctgctttttatccgtaaaggcgtaaagctaatcaattcattttccgagggattaaagaataatcgttctgttgccgtacacaaagacgcgctgagcaagtacctgatacagcgcacggctcagtacgttcttctcaacgtcacggccagcacgcatcatatcttctgccgtataggtgtgatccacgtggatcacgtcctgcatgatgattggaccttcgtccagattgtcattcacgtagtgcgcggttgcgccaatgatcttcaccccacgctcgtatgcctggtgatacggacgcgcgccaataaaggctggcaggaaggagtggtggatgttgataattttgttcgggaagcgcgccacgaaggatggcgtcagcacgcgcatatatttcgccagcaccacgtagtccgggttatgcgcttcaatcgcagctgccatcaggttgtcgtgctcttcacgggtatagccttcgtgactgaccagctcaaacggaatgtcaaaacgttcaaccagcgtacgcagcgtctcatggttgccaatgacggcggcaatttcgacgtccaggccaccgtagttggctttcatcagcagatcgcccaggcagtgcgcctctttggtgaccagaatgacaatgcggcgacggcccgccgggttaagctcgcgcaccgagccttccggcagggcgctgtccagatcggcaagcagggttgtgtcgttgaaaataccttccagttcggtacgcataaagaagcgaccggtacggtggtcaacgaactcgttgttctgcacgatattcagttcatgcttgtagcaaatgttggtaattcgtgcgatcagccctttttgatcgggacagatagtgcgcagaactttacgttgtaatgattgcatcgccgggaaatcctgtttatgtatttgcgaagtctgagttgtcaggcattactgccgcaacactttttaaattttttttcctgaaccacaggggcagggatcgnnnnnnnnnnnnnnnnnnnnnnnnnnnnnnnnnnnnnnnnnnnnnnnnnnnnnnnnnnnnnnnnnnnnnnnnnnnnnnnnnnnnnnnnnnnnnnnnnnnnnnnnnnnnnnnnnnnnnnnnnnnnnnnnnnnnnnnnnnnnnnnnnnnnnnnnnnnnnnnnnnnnnnnnnnnnnnnnnnnnnnnnnnnnnnnnnnnnnnnnnnnnnnnnnnnnnnnnnnnnnnnnnnnnnnnnnnnnnnnnnnnnnnnnnnnnnnnnnnnnnnnnnnnnnnnnnnnnnnnnnnnnnnnnnnnnnnnnnnnnnnnnnnnnnnnnnnnnnnnnnnnnnnnnnnnnnnnnnnnnnnnnnnnnnnnnnnnnnnnnnnnnnnnnnnnnnnnnnnnnnnnnnnnnnnnnnnnnnnnnnnnnnnnnnnnnnnnnnnnnnnnnnnnnnnnnnnnnnnnnnnnnnnnnnnnnnnnnnnnnnnnnnnnnnnnnnnnnnnnnnnnnnnnnnnnnnnnnnnnnnnatcgttacgaccgaattgcggacgtgtgccgtcaatataataccattgcccgctgtcctttaagaaccgtgagcgctcaatgatggcgccgggtttgttttgttcgctaaagcgggcgacaaaactgacatagccctcgttggcatcgcggccgggagcggcttcaaagacggtgaggcccagccagacggtgttggcaaatccggcttcaatctcttggcgaaaatcggcagcatggcaggacggatgccaggttctaatcaggtagtctgcgtttttgatcacaaaagcagtataccgcgagcgcataaggtgtgacggctctggtgcaacctgctcgccagaaagatatcgctggcaacataggctatactccagagcgctaccacaggggcagagttgagacacgattctcttcctggaacaaaaaataaggcgttaaacgcttaaggtagcaatatgttaactgagcaggtgcgttgacgctatgtcgggaatccaggggaagtaaaacagggctaatgagaaaggtaaaaattggactggcgttgggctcaggtgcagcccggggttggtcacatattggcgttatcaataccttaaaccagatggggattgacgttgatattgtcgcaggatgttctatcgggtcgctggtcggatccgcgtacgcctgcggtaagctcccggagcttgaaagctgggtgcgctccttcagttactgggatgtgctgcgcctgatggatctctcctggcagcgtggcggcctgctgcgcggcgaacgcgtgttcaatcagtttcgtaagataatgcccctcgctgacttcagccactgccaaatgcctttcggtgccgttgcaaccaacctcagtacgggcagggagttatggctcaccgaaggggatatacatctcgccgttcgcgcatcctgtagcatgccggggttaatggcgcctgtgcctcacaacggctactggctcgttgatgggggcgtagtgaatcctgtacccatctctctgacccgcgccatgggggcggatatcgttattgccgtggatttacagcacgacgcacaccttatgcagcaagatttgatgccggttaatcttcagagcgatgacgcggaagaagagaaacttgcctggcatgcgcgattacgcggcagaatagggcgcctgaccgcccgtcgcgcggtgaccgcgccgaacgccattgaaatcatgacgacctctattcagatccttgagaatcgcctgaagcgaaaccgtatggctggcgatcctccggatattcttattcaaccctattgtccacaaatctctacccttgatttccaccgggctgaggccgccatagcagcgggctcgttagccgtcgaaaagaaaatagatgaactgttgccttttgtgcgtacagcacgttgagcacttttttgattacttcagcaaaatctgacaggcgatagtaccaatagcatgccactattgagtaactgtcagccaggggaggaaccatgacacagccattggccggaaaacatattttgatagtagaagacgagcccgttttccgatcgctactggattcgtggttatcctcactgggtgcaaccacgtcccttgccgaagatggcgtcgaggcactggaaaaaatggccagcatggcgcctgatctgatgatctgcgaccttgagatgccgcgcatggacggattaatgctggtggaaaacctgcgtaatgaaggttatcagacaccgatactggtgatctcggcaaccgaaaatatggcggatattgctaaggcgttgcgtttaggtgtgcaggatattctgctcaaaccggttaaagatttgaaccgtctgcgtgaaacggtgttggcctgcctgtatcccaatatgtttaattcccgggtggaagaagaagaacgtcttttccaggactgggatgctttagtcagtaatccgctcgcggccgcgaagctgcttcaggaacttcagccgccggtgcagcaaaatatctctcattgcagagtaaattatcgccagctggtagcggctgaccagcctggactggtgctggatattgcgccgctatcagattctgacctcgctttttattgcctggatgttacccgggcgggagataacggcgttctggcggccttattactccgtgcgctgtttaatggattgctacaggaacaattatcccatcaggggcaacgacttcctgagttaggcagtttactaaaacaggtcaaccaactttttcgccaggccaatttgccggggcagttcccgcttctggttggctattatcacagcgggttgaataaccttattctggtctctgcgggtttaaatgccacgctgaatactggcgaacaccatattcaggtgagtaacggcgtgccgttgggtacgctgggaaatacttaccttaatcaaattagccatcgctgcacctcctggcagtgccaaatttggggtgccggagggcggttacgcttaatgttgtccacggagtaagcagtcagattttatttttcagattgctttacctgtgtttttgctggcagtgctactatcgctgcaagtttcatgcgtatttgtcttaattgatcggcaacgcgttcttttcagacccgtattagtggctgagactgtatactcaacgcgttattcaatgcataaaagttcaaaacttgaacagttcaggagaatttcaatggctgcccttaattcgaaagtcagaaaggccgttatcccggtggcgggattgggtaccaggatgttgccagcgacgaaggcaatcccaaaagagatgctgcctctggttgataagccattaatccagtatgtcgtgaatgaatgtattgcagcaggtatcaccgaaattgtgctggtgacgcattcatctaaaaactctatcgaaaaccatttcgataccagtttcgaactcgaagcaatgctggaaaaacgcgttaagcgccagttgctggaggaagtgcagtctatttgccctccacacgttaccattatgcaggttcgtcagggcctggcgaaaggcctggggcacgcagtattgtgtgcacacccggtagtgggtgatgagccggtcgcggttattctgcctgacgtgattcttgatgagtacgagtccgatctttcccaggaaaacctggcggaaatgattaaacgcttcgacgaaaccggcagcagccagattatggttgagccagtcgacgacgtgaccgcttacggcgtggttgactgcaaaggcgttgacctgcaacctggcgaaagcgtaccgatggttggcgttgttgaaaaacctaaagcggacgtcgcgccgtctaaccttgctgtcgttggtcgttacgtactgagcgctgaaatttgggctctgctggcgaaaacgcctccgggtgcgggcgatgaaatccagctgacggatgctatcgatatgctgatcgagaaagagaccgtggaagcctaccatatgaaaggtaagagccatgactgcgggaataagctcggttatatgcaggcattcgtcgaatatggtattcgccataacagcctgggtgaagaatttaaagcctggctcaaaggtagcgtgggtattaagtaataaactcacagcccagtgaacaagaccggtggagcgatgcccaccggtttttttatgcctgtcgctccgtaattggcgggggattgtcagggacgttaaatagggagcctcacaatatgacagaatgtaaggagatgttcgggcaaatattacaggcataaaaaatcccgcattaagcgggatttttcagaatctttccagattaatccttgatcaggaagtcatccagttgtttaccttgttcgtccattgctttcttgattacagcaggagtacggccctggccggtccaggttttctcttcgccgttctcatcgatgtagctatatttagcaggacgtgccgcgcgttttgctttggtaccggttttagccgcagccatgctgttcagcaattcgtttggatcgataccatcggcaatcagcatttcacgatactgttgcagtttacgtgtacgttcttcgatttcagccgcagcagcgctttcttcttcacgacgttcgttaactacaacttctaatttttcgagcatttcttcaagcgtctcaagggtacattctcttgcctgcgcacgaagagtacggatgttgttcagaattttaagtgcttcgctcattgtagtaatctcaaacttataatgggggtgggtttgttgtcctaataatagagccttaatttcacttgtgcaataggtgggaatgtaaggaattcaaaaaatacaaaataaacgacgctattattaattacgctaacttaaatttcattgtttgttgggtctgtgagatatcgtttcaaacggcaaaagcgcgtcatttgcgtgtatgttttgtgacttttacctcaggaattatagttgcgattgataaatatcagccttttgtattaccccgagtaagcgcagcgaagacaagaatagttaataaatagtgaattttaatgaacgaagaagacactataaaaagaagtgttatctctggttgcggactcaccttattgtcagtgtttaatgcctttactgcctgttttaacgcattattttgcgccattcgcgaaggatttactgatgcatggcaggctggagagcgcagcccgccgctgatgacggtacaaaatatggtacaatgatccatcgggaatattacacattgattagggttcttcggccaatggcacaactttatttctactattcggcaatgaatgcagggaaatcgacggcgttactgcaatcctcatacaattatcaggagcgggggatgcgtaccgttgtttataccgccgaaatcgacgatcgctttggggcagggaaggttagctcaagaatagggctctcgtcgcctgcaaggctgtttaaccctgaaacggacctgctggaggacattcgtgccgagcatgcctctaagcctgtccattgcgtgctggtagatgaaagccagttcctgacccgagagcaggtccatgcactttcagaggtcgttgatgagctggatattcccgttctttgctatggattacgtaccgattttcgtggggagttatttgccggcagtcagtatctgctcgcctggtcggataagctggttgagctgaaaacaatctgcttttgtggccgcaaggcaagtatggttcttcgcctggaccagtcgggtaaaccctatgctgatggcgagcaggtggtgataggaggcaatgaacgttatgtctcggtctgccgcaagcattataaagaggcgctggctgtaggctcgctgacggcgttacagggcgacaatcgaaaataataagaatgttttacggatcctcagatataaaaaaaaccgnnnnnnnnnnnnnnnnnnnnnnnnnnnnnnnnnnnnnnnnnnnnnnnnnnnnnnnnnnnnnnnnnnnnnnnnnnnnnnnnnnnnnnnnnnnnnnnnnnnnnnnnnnnnnnnnnnnnnnnnnnnnnnnnnnnnnnnnnnnnnnnnnnnnnnnnnnnnnnnnnnnnnnnnnnnnnnnnnnnnnnnnnnnnnnnnnnnnnnnnnnnnnnnnnnnnnnnnnnnnnnnnnnnnnnnnnnnnnnnnnnnnnnnnnnnnnnnnnnnnnnnnnnnnnnnnnnnnnnnnnnnnnnnnnnnnnnnnnnnnnnnnnnnnnnnnnnnnnnnnnnnnnnnnnnnnnnnnnnnnnnnnnnnnnnnnnnnnnnnnnnnnnnnnnnnnnnnnnggtttttttatcatactgtcaatcaagcatttttcttcgctttcttgtcagcctttacaactgcggggatttcaacttttacggcagcgacatcgctttcagtgaagttacgaccgtaataagtatccagcaggatctgtttcagttcggaaatcagtgggtagcgcgggttagcaccagtacactggtcatcgaatgcatcttcagacagcttatctacgtgagcgaggaagtcagcttcctgaacgcctgcttcgcggatagatttaggaatacccagttcagccttcaggctctccagccatgccagcagtttctcgatcttcgcggcagtacggtcgcccggtgcgctcagacccaggtgatctgcgatttcagcataacgacggcgcgcctgtgggcggtcgtactggctgaatgcagtctgcttggttgggttgtcgttggcgttatagcggataacgttgctgatcaacagggcgttcgccagaccgtgaggaatgtggaactgtgaacccagcttgtgcgccatggagtgacagacacccaggaaggcgttagcaaacgcaatgcccgcgatggttgccgcactgtgtacacgttcacgcgcaacagggtttttcgaaccttcgttgtaagaagctggcaggttttctttcagcagtttcagcgcctgcaaagcctgaccgtcagagaactcagaggccagtacggaaacgtaagcttccagagcgtgagttaccgcatccagaccaccgaacgcacacagtgatttcggcatttccatgaccaggttggcgtcaacgatagccatatctggcgtcagtgcgtagtcagccagcgggtatttctgaccggttgcgtcatcagtcacaacggcaaatggcgtcacttctgaaccagtaccggaagtggtggtgacggcgatcattttcgctttcacgcccattttcgggaacttgtagatacgtttacggatatccataaagcgcagcgccagttcttcgaagtgagtttccggatgttcgtacatcacccacataattttcgcggcgtccattggggaaccgccacccagtgcgatgatcacatcaggtttgaaggagttcgccagttcagcgcctttacgtacaacgctcagggttgggtcagcttcaacttcaaagaagacttcagtttcgacgccagccgctttcagaacagaggtgatctggtctgcatagccattgttgaacaggaaacggtcggtcacgatgagcgcacgtttgtggccatcagtaatcacttcatccagcgcgattggcagagagccgcggcggaagtagatagatttcggaagtttgtgccacaacatgttttcagctcgcttagcaacggttttcttgttgatcaggtgttttggaccaacgttttcagagatggagttaccaccccaggaaccacaacccagagtcagggaaggtgcgagtttgaagttgtacaggtcaccgataccaccctgagaagcaggggtgttgatcaggatacgtgctgtcttcatcttctgaccgaagtaagcaacacgctcaggctggttatcctggtcggtgtacaggcaagaggtgtggccgataccgcccatcgccaccagtttctctgctttttctaccgcgtcatcgaaatctttcgcacggtacattgccagcgtcggggagagtttctcgtgagcaaacggctcactttcatcaacgactttcacttcaccaatcagaatcttggtggtagcagggacgctaaagccagcgagctcagcgattttatacgcaggctgacctacgatagccgcgttcagcgcaccatttttcagaatcacgtcctgaacggctttcagttctttaccttgcaacaggtagccgccgtggctggcgaaacgttcacgaacggcgtcgtataccgaatcaaccacgacaacagactgttcagatgcacagataacgccgttatcgaaggttttagacatcagcacagaggcaacagcacgcttgatatcagccgtttcgtcgatcaccacaggggtattacctgcgcctacgccgatggctggtttaccggagctgtacgctgctttaaccataccaggaccaccggtcgccagaatcaggttaatgtccgggtgatgcatcagggcgttggacagttcaacagaaggttggtcgatccagccgatgagatcttttggtgcacccgccgcaatagcagcctgaagcacgatatctgctgctttgttggtggcgtccttcgcacgtggatgcggggagaaaatgattgcgttacgtgtcttcagactgatgagagatttgaagatggcggtagaggttgggttagtggttggaacgataccgcaaatgatgccgatcggttctgcgatggtgatggtgccgaaagtatcgtcttctgacagcacaccgcaggttttctcatctttataggcgttgtagatatactctgaagcaaagtggtttttgatcactttatcttcaacgatacccatgccggattcggcaacggccattttagcgagagggattcgagcatcagcagcagccagagcggccgcgcggaagattttatcaacctgttcttgggtgaaattggcatattcacgctgggcttttttacgcgctcgacgagggcgttcagttcagcgatattggtaacagccataatgctctcctgataatgtttaaactcttttagtaaaccagcgctcgatacgtctgacagtatagtcagagccgatcccacttgcgtaacacacagtaaaacaaaggattactcactgctccagctcactaatttactaaaagagccttaccttagcatcatacctttttgataggtgatctccctggcggcgtaaccaagattactcacttctgagtacgaaaattatgatcgagatcaattttgtcctaagctgatacctttcagcagggttattttgtgctaattattctactgttaaataattaagtaactattggaagcagcgatatcattgattacacaaatgtttaacatcatgaattgataacgtttaagaacagatttctggtgaagtatgcggctaaaaagcgtatcttcagcgcggatttatcatgacacgcagtttctccctggccatgctcaattgcggagcttaatgtgattcaaacgctctttgatttccctacatatttcaagttttttatcggcttgtttgctctggttaacccggtagggatcatccctgtcttcattagtatgaccagctatcagacggctgcggcacgaaataaaaccaacctgacggcaaacctgtcggtggcgatcatcctacttacctctctttatctcggagacgccattcttcaggtcttcggcatctcaattgattcgttccgtatagcaggcgggatcctggtggtgacgattgccatgtcgatgatcagcggcaagctgggggaggataaacagaacaagcaggaaaaatcagagacagctatccgcgagagcatcggggtcgtgccactggcactgccgctgatggcgggcccgggggcgatcagttccactattgtctggggaacgcgctaccacagcctgatgcacctgattggcttttccgtcgctattgcgctgttcgcgctgtgctgctggggtgtatttcgtatggcgccatggctggttcgcttgctgggacaaacgggcatcaacgtgattactcgtatcatgggtctgttgttaatggcgttgggcatcgaatttatcgttaccggtattaaaagtatattccccgggttagtacactgactttcatttgaaagagcggagccagcggctccgtttttttacgttgattatctgcaaatcatataaataaagttgaaataggcgccagtcataataagttctactaataatcctcttctgttgtttttcaaggggttgtttattttcatttccccttgccgcgcataaatccctcaaaccctctgttattttactcacatgatactctggggcttgctgacagataaccgaaatgatattagtaatttcgacgctggctcagacgaatgtgctaaataataatcaattgttaaattatcgtgaaaaatcgttcagccaagctttgtcgtcgcgtttgtagcaacaaaatttcttatctgtatgaattacttctctttttgttgatttcggcgtaagccagggttggcaccacagttatgccagccatcgtaaaagagaaatgcttaacaaatttgcaaaatgtattggcgagagttggcaccatttggtactttccggccttatattttgcagcattaaacaagttgatgagaactattttcatatagccctcacataagatatccaacgcatctctctgacaggggagaggtgtaaagaatcgacgcaagaccgccgtacgagcggtcagtaataatgaagtcggtgatagcaagaagtaaaaaaagaacctgacagtagcaaaaaaaactcctnnnnnnnnnnnnnnnnnnnnnnnnnnnnnnnnnnnnnnnnnnnnnnnnnnnnnnnnnnnnnnnnnnnnnnnnnnnnnnnnnnnnnnnnnnnnnnnnnnnnnnnnnnnnnnnnnnnnnnnnnnnnnnnnnnnnnnnnnnnnnnnnnnnnnnnnnnnnnnnnnnnnnnnnnnnnnnnnnnnnnnnnnnnnnnnnnnnnnnnnnnnnnnnnnnnnnnnnnnnnnnnnnnnnnnnnnnnnnnnnnnnnnnnnnnnnnnnnnnnnnnnnnnnnnnnnnnnnnnnnnnnnnnnnnnnnnnnnnnnnnnnnnnnnnnnnnnnnnnnnnnnnnnnnnnnnnnnnnnnnnnnnnnnnnnnnnnnnnnnnnnnnnnnnnnnnnnnnnnnnnnnnnnnnnnnnnnnnnnnnnnaggccggtcattataatgagtggagtatcaacacaatgtccatcatcacaaaaaaaagtctggtagcggcggggattttaactgcgctaatcgcgggcaacgctgcaatggctgcggacgttcctgctggtgttcagctggctgagaagcaaacgctggtacgtaataacggtgcggaagtgcagtctcttgatccgcacaaaattgaaggtgttccagagtctaacgttaaccgcgatctgtttgaaggtctgctggtgactgacgtagacggccacccggctccgggcgtggcggaaaaatgggacaacaaagattttaaagtctggaccttccatctgcgtaaagatgcgaaatggtccgacggtacgccggttaccgccgaagatttcgtctatagctggcagcgtctggcggatccgaataccgcctccccgtatgcgagttacctccagtatggccatattgccaatatcgatgacatcatcacgggtaaaaagccagtaaccgacctgggcgtaaaagccatcgatgccaacacctttgaagtgacgttgagcgaacctgttccgtacttctataagctgctggttcacccgtccgtctccccggtaccaaaatccgcagtagaaaaatttggtgaaaaatggacgcagcctgcgaatattgtgaccaacggtgcatataagctgaaggactgggtcgttaacgaacgtatggtgctggagcgcaacccgcagtattgggataatgcgaagaccgttatcaatcaggtcacctacctgccaatctcttctgaagtgacggacgtaaaccgctaccgcagcggtgaaatcgacatgacctataacaatatgccgattgaactgttccagaagctgaaaaaagagatccctaaagaagttcacgtcgatccgtatctgtgcacctactattacgaaattaacaaccagaaagcaccgttcaccgacgtacgtgttcgtaccgcactgaagctggctctggatcgcgacattatcgtgaataaagtgaagaatcagggcgacctgccggcttacagctacaccccgccttacaccgacggtatgaagctggttgaacctgaatggttcaaatggtcccaggaaaaacgtaacgaagaagcgaaaaaactgctggctgaagctggctataccgccgacaagccgctgacctttagcctgctgtacaacacctccgatctgcataaaaaactggctattgccgtcgcgtcaatctggaagaaaaacctcggcgtgaacgtgaagctggaaaaccaggaatggaaaaccttcctcgatacgcgccaccagggaacctttgacgtggcacgtgcaggatggtgtgcggactataacgaaccgacctcattcctgaacaccatgctgagcgacagttcgaacaataccgcacactataagagcccggcgtttgataagctgattggcgaaaccctgaaggtggcagatgacgcccagcgcgccgatctgtacgcgaaatcagaacaacagctcgataaagactctgcgatcgttccggtttactactacgttaacgcccgcctggtgaaaccatgggtagggggttataccggtaaagacccgttggataatatttccgttaagaatctttatattatcaagcattaatggcaatacgtggggcgagcgagcttgccccactgtgtctattttgtaacattcatcaggcacacgccagaaggtacgggcaatgttgaaatttatcctgcgtcgctgtcttgaagcgattccaacgttatttattctaattacaatttccttcttcatgatgcgtcttgcaccgggcagtccttttaccggtgaacgcacgcttccgccagaagttatggccaacatcgaagcgaaataccatttaaacgatcctatcaccacgcagtacttcaactatctgaagcagcttgcacacggtgattttggtccgtcatttaaatataaagactattccgttaacgacctggtggcgtcaagcttcccggtatcggctaaattaggggctgctgcatttatcctggccgttgttctcggtgtcactgcgggcgttatcgctgcgctaaaacaaaatacccgatgggattacgccgtaatgggggtcgcaatgaccggggtggttatccccagcttcgttgtcgcgccgttgctggtcatgatattcgccataaccctgaaatggcttcccgggggcggctggaacggcggggcgctgaagttcatgatattgccgatggtggcattatctctggcctacatcgccagcatcgcccgtattacccgcggttcaatgattgaagtcctgcactcgaacttcatccgtaccgcccgtgcgaaagggctgccgatgcgccggattattttccgtcatgccctcaagcctgcactgttaccggtactctcctatatgggtccggcttttgtcggcattatcacgggttcaatggtgattgaaaccatttatggcctgccgggcatcgggcagctgtttgttaacggggcgcttaaccgtgactattcgctggtgctgagcctgacgatcctcgtgggcgcgctgaccattctgtttaatgccgttgtcgatgtgctgtatgccgttatcgacccgaaaatccgttactaactggagcacgccatgatgttgagtaagaaaaacagcgaggcgctggaaaacttcagtgaaaagctggaggtcgaaggtcgtagcctttggcaggacgcccgccgtcgttttatgcataaccgtgccgccgttgccagcctggtcgtgctggtgcttatcgcgctgttcgtaaccctggcaccaatgctctctcagttcacctatttcgatacggattggggcatgatgtccagcgcgccggatatggaatccgggcactatttcggcaccgactcctccgggcgtgatttgctggtgcgtgtggcgattggcggccgtatctccctgatggttggcatcgcggcggcgctggtggcggtgattgtcggcacgctttacggctcgctttccggttacctcggcgggaaagtggactccgtgatgatgcgtatgcttgaaattctgaactccttcccgttcatgttcttcgtcattctgctggtgaccttctttggtcaaaatatcctgctgatcttcgtggcgatcgggatggtgtcctggctggatatggcgcgtattgtgcgcggccagacgctgagcctcaaacgtaaggagtttatcgaagccgcacaggttggcggcgtttctaccgccaatattgtggtgcgtcatatcgttcctaacgtgctgggcgtggtggtggtgtacgcctccctgctggtgccaagtatgatcctgtttgaatctttcctgagcttcctgggattaggtacgcaagagccgttgagtagctggggcgctctgttaagtgatggcgcaaactccatggaagtgtcaccgtggttactgctgtatccggcgggcttcctggtcgtcaccctgttctgtttcaactttatcggcgatggcctgcgtgatgccctcgacccgaaagaccgttaaggagcgccgtcatgaccattattgaaacggcaaccgcgccacaggcgcaacagtggaccagcgcactgctggacgttaaagacctccgcgtgacgtttaaaacccctgacggtgatgttactgccgttaacgatctcaacttcgacctgcgtgccggtgaaacgctgggcattgtgggcgaatccggttccggtaaatcccagaccgcattcgcgctgatgggcctgctggcgtcaaacggcgtgatcggcggttcggcgacgtttaacgggaaagagatcctgaatttgccggaacatgagctgaacaagctgcgcgccgagcagatttcaatgattttccaggatccgatgacgtccctgaacccctatatgcgggtgggcgaacagctgatggaagtgctgatgctccacaaggggctgggtaaagccgaagcgtttgaagagtccgtcaaaatgctggatgcggtgaaaatgcctgaagcacgcaagcgcatgcgcatgtatccgcacgagttttccggcggtatgcgtcagcgcgttatgatcgcgatggcattgctttgccggccaaaactgctgatcgctgatgaaccaaccaccgccctggacgtgaccgttcaggcgcagatcatgacgttgctgaacgagctgaagcgcgagttcaacaccgccatcattatgatcacccacgatttaggcgtcgttgccgggatctgcgacaaagtgttagtcatgtatgcaggccgcacgatggaatacggtaatgctcgcgatgtgttctatcagccagcccatccgtactctatcgggctgttgaatgccgttccgcgtcttgatgcggaaggggagtcgctgctgactatcccgggtaacccgccaaacctgctgcgtctgccaaaaggctgcccgttccagccgcgttgtccgcatgcgatggaaatctgtaacagcgcaccgccgctggaagcgtttgccccaggccgtctgcgcgcctgctttaagccgctggaggagctggtatgaacgcgatcgacgaaaaaagaaatgtgctgctcgaaatcgctgacctgaaggtccatttcgatatcaaagacggtaaacagtggttctggcagcctgccaaaaccctgaaagcggtggatggcgtcacgctacgcctgtacgaaggcgagaccctgggcgtggtaggcgaatccggctgcggcaaatcgacgtttgcgcgtgcgatcatcggcctggtgaaggccaccgacgggaaagtggcctggcttggcaaagatctgctggggatgaagccggatgaatggcgcgacgtgcgcagcgacatccagatgattttccaggatccacttgcgtccctgaacccgcgtatgaccattggcgaaatcattgccgagccgctgcgcacctatcatccgaagatgccgcgccaggaaattcgcgatcgggtgaaagcgatgatgctcaaggtgggtctgctgcctaacctcatcaaccgctacccacacgagttttccggcggtcagtgccagcgtatcggtatcgcacgcgcgttgatccttgaaccaaaactgattatctgtgatgagccggtttcggcgctggacgtttccatccaggcccaggtggttaacctgctacagaaactgcaacgggaaatggggctgtcgctgatcttcatcgcccacgatctggcggtggtaaaacacatttcggaccgtgtgctggtcatgtatctgggccacgccgtggagctgggcacgtatgatgaggtgtaccacaatcctctgcacccttataccaaagcgctgatgtctgcggttcccgttccggaccccgatctggaaaaaaataaaaccattcagcttctggaaggtgaactgccttcgccaatcannnnnnnnnnnnnnnnnnnnnnnnnnnnnnnnnnnnnnnnnnnnnnnnnnnnnnnnnnnnnnnnnnnnnnnnnnnnnnnnnnnnnnnnnnnnnnnnnnnnnnnnnnnnnnnnnnnnnnnnnnnnnnnnnnnnnnnnnnnnnnnnnnnnnnnnnnnnnnnnnnnnnnnnnnnnnnnnnnnnnnnnnnnnnnnnnnnnnnnnnnnnnnnnnnnnnnnnnnnnnnnnnnnnnnnnnnnnnnnnnnnnnnnnnnnnnnnnnnnnnnnnnnnnnnnnnnnnnnnnnnnnattcagcttctggaaggtgaactgccttcgccaatcaacccgccttcaggctgcgtattccgtacgcgatgcccaatagccgggccggaatgtgcaaaaacacggccggttctggagggcagtttccgacatgcggtttcctgcctgaaagtagacccgttataatcgcaagggctgacatgatgtcagcccttatttttcgaggttaatgtgtcgcgattattcacgtcggcccgtcagcggctgtatcaccttttatttgatcctgaaacggtttccggtcgccgcttcgaaggtctgtgtggtttatttgcgctgattagcgtcattattatctttatcgaatccggcgccggaacgcagtaccacatgacgtatgaggagtggcacgttttcgtctggctggaattgattgtcacgctggtgtttactgcggaatatgtgctgagggtcattagctggccaaatccggcgaaatacgttttcagcttctggggatttattgatttagccaccatcctgccgctgtatgtcatgtggctgtggcctgagatcagcttgaattatgtgtttgcctggcgtgcaatgcgggcgattcgtgtgttacggattctcaaactgctgcgctttatgccgtcgctgcgggttttttgggttgccattgtcagcgcccgccaccagctgattctcttctattcgtttattgctatcgtgatgatcgtttttggctccctgatgtatttaatcgaagggccgaaatacgggtttaccacgcttaatgcgtctgtttactgggctatcgtcacggtgaccaccgtgggctatggcgatattaccccgcatacgccgctcggacgtattgtggcatcggttcttatcctgatcggctattcggtgatagcgattccgacggggttaattaccacccatatgagcagcgccttccagaacagcaagcagcaacgcaaatgtccgaattgtcagcaggggaatcatgaacccggcgcgcggttttgtcaccgctgtggaaatgccttaccggattaaataaaaaggctgcgcgggcagccttttttattattcgcgccagaggatatggcacagtttgtgatctttctcgcggcacagcaggacgcgggcaaagatgtcgttaatttctccgccgtcttcatctgcaaggccaatcaccacctcggcgaagaagtccgggttgagatcaaaatcgacatgttcggcccagtcttcagccggatcgaacagctcagcaccgccacgctcttcgaattgcaggttgaaaagaatgacgtcagcagggtcgagattatcgaccgccagctcgagaaaaatatcgtaggcctgttcgagcgtttcgtcttcggtcaggcgattgttcagatccatttccatgatgactacctgttaaacatcgttgggcacgttttacagcaacggactaaagaagtaaaacagtcgttcggcaattcgctgccacagcggacgtttcgcccacagtctggcgtccagcaggcgtgagcgggagatataatcgtcctgaaccgctgccagatcgccaccgaacccggcgtcatcaatgaccagcgtaatttcaaaattcagccacagactgcgcatatcgaggttgacggtacccaccaggctcagctctccgtccaccagcacgctcttggtgtgtaacaggccgccttcgaactgataaattttaacgcctgcggccagcagctcactaaagaacgcgcggcttgcccatcccaccagcagcgaatcgttcttgcgcggcataataatgctcacatccactccgcgctgtgccgctgtacagatggcatgcagaaggtcgtcgctgggaacgaaatagggcgtggtcatgatcagatattcccgcgcggagtacgcggcggtcagcagtgcctgatggatcagatcttccgggaagccaggaccggaggcgatagtgtggatagtgtgcccgctggcttcctcaaacggcatgatattgccatccggcggcgggggaagaatgcgtttaccggtttcaatttcccagtcgcaggagtagacgatgcccattgaggtcgcgatcggtccctccatccgcgccatcagatcgatccattgccccacgccggaatcctgcttgaagaagcgggggtcaaccatgttcatgctgccggtgtaggcgatgtagttatcgatcagaaccattttccggtgctggcggagatccatgcggcgcagaaagacgcggaaaagattcacttttagcgcctcgaccacctcgataccggcgttgcgcatcatacctgcccacgggctacggaaaaaggccacgctgccggcggagtccagcatcaggcggcagtggataccgcgacgtgcagcggccattagcgattcggcgacctggtccgccatgccgcccggctgccagatataaaacaccatctcgatattatgccgggcgagctggatatcacggatcagcgcctgcatcacatcatcagaagaggtcatcagttgcagctgattgccttttaccccagcaatcccctggcggcgttcgcacagcttgaacagagatgcggccacgctactgttctcttcagcgaagatatgcttgcaggctttaaggtcggcaagccatttcgccgtggagggccacatggcgcgggcgcgttcggcgcggcgtttacccagatgaagttcaccgaaagagagataggcgatgatgcccaccagcggcagaatgtagataatcagaagccaggccatggcggaaggtaccgctctgcgtttcatcagaatgcgcaacgtcaccccggcaattaacagccagtatcctaaaatgaccagccaactcaccacggtgtagaaggttgtcataaataaaaaatccttttgaaagcgtattgttatgagtttacgcatcaggattcatctggcaaataaaaacggcagataaaagcgctggtttgccgcctgcttaggcatataatggcatctctgttagagaaagagttgtagacatgaagcgcagtagaactgaagttgggcgctggcgcatgttgcgacaggtgagtcgtcgtaaggctcgttggctggaagcacaatcccgccgcaatatgcgtatccacgccatcagaaaatgtggcctgaacagacaccgtaacgcgctgttgttcgcggtccaggacatctgaaaagcatgaagggcaccgtaaaggtgcccattaaacatccaggctatcaatttttgcagtctcttcccatctgcttccgcgatatactaacttccaataacgtcatgatattaaaagatgaatccttatctctggatttttattgtacttttggcgctggatgcgctcagggaagatttaggactttcgtcattttcctcattggcagattatgttttcgcatggggaatacatttttattaaaggaaaaaaggatgaacggaaaagtaatggcagcactctttgggattgcgatattaagcggttgtgccagcagcaaaacctcacccgaacggcacgcgttttatttcgtgtcgcatcagtccagctttactggcggcaattacacctccagcgtgcagaaaaattatcagctgaacgtggcgcagttccgcgagctttatgcccgtggcaaagctgaccgcgcggaagggcggactgaggctgaagccagtgaatacgcgcaaagcattcgcgatcagctaaaagaaaatgcgaagtcgcaggaattgttcgcaggcaacgcgaaggataaatggtcttcggacatggacagtaaagacgccctattatttggtaacgaactggccgcgacttatcttgatggctataacggcgtacaatagcgcaactgattcaggggataccgtaattaccggtatccccgctgtttttgagcgaaaggagtgagacgtgtttgcggagtttggtgtactgaatttctggacctatgttgtcggcgcattttttatcgtgctggttccaggaccgaacaccttgtttgtgctgaaaacagggattggccacggcgttaagaaaggctatctggcagccaccggtgtgtttattggtgatgccgtgctgatgtttctggcctgggcgggcgtcgccgcgttgatccagaccactccggttttatttaatattgtccgctatctgggcgcgttttatctgctgtggctgggcggaaaaatgctctggtccgttatgacgcgtcaaaaaaatgcgcacgaaagtagcgccgaaccggcaagcgcaatccttaagcgttcgctggtgctgagcctgacgaacccgaaagcgattctcttttacgtgtcgttcttcgtgcagttcattgatgtcaatgcgaagaataccggcacgtcgttcctgatcctcgccacaacgcttgagctgatcagcttcatgtacatgagcttcctgattttctcaggcgcgtttgtcacgcgttacctcaaaaccaaaaagaaactggcgaagctggggaacgggctgataggtctgctgtttgtcggatttgcggcgaggctggcgtcgctgcactgaatgaagaaaaggctcccgagggagcctttcgtttcagaatacttttttatacggacgaaccgtgactttctcgtacacgccggctgcgacgtacgggtctgcttctgcccaggcctgcgcggcttccagagattcaaactcggcaatcaccgtggagccggtaaaacccgccgcgcccggatcgttgctgtcaacggcaggcatcgggcctgcggtcagcaaccgaccttcatcctgtagcaactgtaaacgcgccagatgagcagggcgaacggaaagacgtttttccagagaatcaggtacatcttcagcgtaaatcacgtaaagcacggcaaagctccttaaccggtaaaagtgacaattacgttatgtgaaagcgcaaatgactgcaatgtaaagataataacaatgttaaaaccctgatctggatgccccttttttgccctcatgtacgcttaaattgcgccaggacaaagtgtcttattgaatatgattgctatttgcatttaaaatcgaggttcggttttttaacgttgatgattatgacttcgatgacccttgatttacctcgccgctttccatggccgacgctgctttccgtcgttattcacggtgctgtcgtggcgggtctgctctatacctcggttcatcaggttattgaaatgccggcgccagcgcagccaatttctgtgaccatggtatcgcctgcggatcttgagccgccgcaggttgcgccgccgccgccacagcccgttgttgaacccgagccggagccagagcccgagccggttcctgaaccgccgaaagaagcgccggtagtgatccataagccggagccgaaacctaagccgaagccaaaacccaagccggtcaaaaaggtggaagagcgtccgaaacgcgaagtgcgtccggttgagccacgcgccacgcagccggttgaaaatgccgccccgtcacgtccgctgatgaataacaccacgaccgcgacaaaaccgacggtaacggcgcccgcgggcccgcgcgcgctgagccgtaaccagccgcagtacccggcacgtgcccaggcgttacgtattgaagggcgtgtacgggtgaaattcgacgttacggccgatggacgtgtcgataacgtggaaatcctgtccgcacagccggcgaatatgtttgaacgcgaagttaaatcggccatgcgcaggtggcgctatgaagccggtaaacccggcaatgggttgattgtgaacattgtcttccgcctgaacggcggggcacagatggaataaaagaagcctccgcaaggaggcttttttttacctgaggatcagctccgtgggagctggcggggcttaccgtcgctatccaccgccacatagatgaataatgcctccgtcgccttatagcgctgaccaatcggttcagaagagacttttttcacccatacttcaatgttgatggagacagacgtattgccgcgttttacgcagcgtgcgtaacagcacaccacgtcccccaccgcgacagggcgcaggaaggtcatgccatcgacccggactgtcaccacgcgcccgtgtgcaatctcttttgccaggattgcaccgcccatatccatctgcgacatcaaccagccgccaaaaatatcgccattggcattcgtatccgcaggcattgccagtgtgcgtaaaaccagttcgccctgtggggcgtcatttgttgtcattgtttttaaactcgtaactgaagacttcaggcgggatgctactatgatttctggctggagagaatagggttagcgcccgcagagcaggcgccttagggtcagaaggacagtgtcacgccggcgtaatacgcacggcctggttcgttataggtcgatgcaccgtcattttctcggtaaatctgcttatcaaagaggttgctgatcccggcattcaggcggagatcttttgtcagttgatagttactaccgatcccaacgatggaataggcgccaatctctttatctgacatcgcattctgctctttgcggatttcagcattttctcttggcttctggcgaccatacatcgtccagccaatgttcgctgaaagtttgctgttaacctgccagtcgagcatcgtgttgacggtatattttgggataatcgacagagggttgccggtgtccttactttcagactgaatcatatacgtcgcattggtgcgccaggttagcgtgtcgcggataaccgggacggtgaggttgccttccagcccctcaacaacagcctttcctccgttctgccactgaaggatatttgcgccgctgcttgtctggcccagcacgtccgttcccgaaacaatcttgtttttgtaatcgttgcggaaccaggttatgccagcctcgtagccttccagcgcaaaggccaggccaatctctttgttcacgctgatttcaggatccagatccgggttacctaacaggtaacagcttccttcggaaacgttattcgggcagccattgccgcgggtggaaagcagatagccttcgctggattgatacaggtttggcgctttaaatacccgagcgatacccgctttaaccttgaacatgtcacccaaatcctgagagaggttcaggctaggactccagttgctgccaaactgattgtgataatcaaagcggagccctgggatcaggttggtgccctggcgcgcttcaatattgtcctcaagatagatgccagtgaggtcagcgctgtttttgctgttgcgctcagaagccgtaccgggaacgccgttaatcacttctcccgacacatttgtcgcctgcattgaggccggatcgttcagttcatcacggttccattctgcaccgacggttagcgtctgttcgaccagccagaagaaaggcatgttcagttcacccgttgaacggtatgactccagccggctggtatcgtatttatcgctattgatcatcccctcaactttgcccgtagagccttcttccaggcgggtgttgttggtcttttcataataaacaccgaactttgactgaccccagtcccagatgccgttgtgcgtaatgccataagactggcggtacattcggttcgtttcgtgtccatacagggacgacaccagaccttcagggctgacgttgctgttgctgtattgagtatcacccgcgtagatattgccctggcggctgtagctgtagtcgaaatcgataatctgctgtggcgtgagtttccaggagagcagggcattaatgtccttgttgcgcacgccttcacgtccggcggcgtaagaaccgttttgcgcggtgttgatgtcctgagcatctgcgtcagttttgttgatattcccgtacaggcgcatcgttaacgcatcgcccgcaagggggccgctcagatcaaaattagcgcgtttcgtcgctccctctttatcattttcaggctggttagtgtacagggagagcgagccgtgccagtcgttggtcgggcgtttggtaatgatgttgacgacgccgccggccgcccccgaaccatagcgggcggcagcaggtccccggagcacttcaatgcgctcaaccatctctggcgnnnnnnnnnnnnnnnnnnnnnnnnnnnnnnnnnnnnnnnnnnnnnnnnnnnnnnnnnnnnnnnnnnnnnnnnnnnnnnnnnnnnnnnnnnnnnnnnnnnnnnnnnnnnnnnnnnnnnnnnnnnnnnnnnnnnnnnnnnnnnnnnnnnnnnnnnnnnnnnnnnnnnnnnnnnnnnnnnnnnnnnnnnnnnnnnnnnnnnnnnnnnnnnnnnnnnnnnnnnnnnnnnnnnnnnnnnnnnnnnnnnnnnnnnnnnnnnnnnnnnnnnnnnnnnnnnnnnnnnnnnnnnnnnnnnnnnnnnnnnnnnnnnnnnnnnnnnnnnnnnnnnnnnnnnnnnnnnnnnaatcagcgtgttctccggccccataccgcggatgtcgatctggcggttgttaccgcggctgcctgtcgcgctgtttccggtgaggttaaccccgggcattttgcgaataatttctgaaagatcgttaaccggtggatccttttctatgtcctttgccgtgatgatggaaacccccggctgttgcttcagcgcctcttcagcggtggcctgaacaaccattgtttcaccatcggcgagaggatcttccgctgcgtgtgcgctctgataaagcgttgaaagaatggcgagcgtaaatgtagccggggcaaatcttattatgttattcatcaactcatttccatttgttaaaaatgcgatgacgaatattaatgatagtcattctcattacaataaagtgacagcaatctccataaaatcttcatgattcagacattttcgcagggaggatgtagagaaaagagaaggcgggaaaagaggccagaccgcgcggcgatctggccagaaggatcagtgcttgtcatcctgcggcatgtggcgataaatataaacgccgctgagcagggtgaagataagagtcagcgccgtcagaccaaacaccttgaagttgacccagatattctgcggcaaccagaatgcgatatagatattcgccagaccacacagaataaaaaatagcgcccaggcgatattcagacgcccccacacagcctgcggcagggtcagttctttccccagcatgcgctggatcagcggcttcttcatcacccactggctgatgaggagtgcgcccgcaaacaggccgtaaatcaccgtgaccttccatttgataaattcatcattgtggaagaacaacgtcagacctccaaacaccgccaccatcaggaaggtgatgagcgccatcttttcaactttgcgatagcgaacccagctgtaaatcagcaccacagccgttgccacaatcagcgccagcgtaccggcataaatgtcgtacagcttataaaaagcgaaaaatacgatcagcggtaaaaaatcaagaaactgcttcattctgcgatcccagttactgacgaattaacatgtacaggcggaacaaatagaccagcagcacggctgaaatcagattgctcagcgtattggcgacaaccgctccgacgtttggcgttaacaccgcaaaattcggcgcaaacagcaacagcagagttttggccagcagccagctgataacggccggggcgaccagtcgcatattggcccatgcgagcctgatgctgctgcgcatggcggtgaaaatgcccattttgtcctgcacaaccattactggcgcgaatgaaagcacgatagccagcagcacgcccggaacgacaaccaacattatccccatctggaccagcagcgtggtaaggaagatgaggataaacagttttggcagcaccggagcgctggccccgattgcacgtaacgcgctgacgcgttggccggcagacaccagttggatcatcagcaacacgccacccgccagaatggcgttgccaatcaggcccgagaaggtagatgccgcagatgcgcgcagcaagatttgctgttgctctggcgtcatattctgtacaaggtcaaacaaccctgcgctgcctgcaagattttccccctggctcagcgtggcaatctgttcatcactgggtgagaacgcatgacccagcaccaccgtaataaaggcgcacaacaacgcgatcagtaaaaaggtaatgaactgattgcggaaaaaatttcccgtgtcacggtagacagacttcgccgtgatagacatgcactctccttgagtattgcaggtgttaattagccggcaattgtacaccggataacacgctggtggcagcatcaaggcttgtatggaaaagcatatctttgtaaagcggcggtaatccatagcgggcgcgggcgcgattgcatgcctcattgacctgcccatcctctcccgacatcgcgaaagtgcgacacgggctggggcgatccgcgtaaatggaacagcgggtggatacccctggctcaccttgcagtgccacacagcggctctgtttttggttggtgccgcgcatacagcgcagaaaaggggttaagggttcagtgagatcaaccggaacggtgccgccgccatcgctggcttcagcccagtagaaagagactcgaaaatacgcacaacaggctccgcacgtcatgcacgggttatgatcactcatggcacacctgcaaaagtagaacgcatcaaatcacattgtgagagcgataaattatccagccgctacaggaagcgcaagagagggaagacagaaaattttgtaaccatgaaatgccaaaaattgacgcggtaacaacttattgctttatgaggcgtcaccaaaaattaacctagatcaatgaatgttaacttactggttttaatgtgatctgtgttagatcacttattactcatttgtgagtatattctcctccgcaattaaaaccacaacgatggagcggatatgaaaaaattagcggtggcagcccttatcttaagcagtctctctggcggcgcgtacgcgcatgaagcaggcgaattctttattcgtgccggttcggcaacggtgcgtccaacggaagggtccgacaatgtactgggtatgggcgggtttaacgtcagcaataacacccagttaggcctgacgtttacgtatatggcaacggataacattggcgtcgagcttttagccgccacgccattccgtcaccgcgtcggtttaggaccgaccggggacattgccacggttcaccatttgccaccaacgctgatggcgcagtggtacttcggcgattccagcagcaaggtgcgcccttatattggtgcaggcgttaactacaccaccttctttgatgagaaatttaacgatactggtaaagaggccgggctctccgatctcagcctgaaagactcgtggggcatggcggggcaggttggtctggattatctgattaaccgtgactggctgatcaacgcctcggtctggtatatggacattgatacggacgtgcgctttaaagctgacgggcagcagcaaagtatcaatacccgactggatccgtgggtatttatgttctcagcaggctatcgtttctgacagaagatatatcccctgtcagccggtgattgctgtatggtggttgttccacacacctggctggaggggatatccccaacatcaaatttgagtgtccggtttgtgcaggtaaacagtttcagttcacgacgttcagcccagcacatagcctacctcacggtgctatctgttccgtttgcggaacacgtctcaccattcattcatgcctgccgaagctcagacgacgacggtggccaaagccagtaaactagaaaaggcctctgagaggcctttttagatcgtgaagtcacttctgaattaaataacgaatggttggtccgtcctgctggatatccagcacggtatagccgtgatttttggcatcaagaggaatgttattgatcgactgggggcaatcgctcaccacttccagaatttcacctttctttagctgcggtagcgcttcaagcgtggcgacggccgggtaagggcaaggttcacccaccatatcgagacgataatcaggcacgatctctttcatgcggcattctcctgagtttcagttttggcggtggcgcgtcggaagaagcgcttctcttgtgcaacaaccagtaagaaggcgataagcagcagggcgtaggtcaccaggagtcctccgagtggaccaaaggttttcagcaggttgaccttgtcccagtttgttgccagtaccggagagacgtcatcccagtagtaggccagaatggtagagccaatcacgttacccagacccacccaccagtaatgcacctggccttccacagcgcgatacatccagccggtttcacacccgcccgccagcacgatgccaaaaccaaacagcagcccgccaatgacggcatttgggcccgcccacatgattttcggttccacgccgagctgaacgtagctgaagatgccgatcgcgctcacggccataccggcaatgatcgccttcgccatcatggttcgtccggtgatccacatatcgcgaaacgcggaggtaaagcagatctgcgcgcgttcaatcagcagaccaaaaccgacgccgaacagcatggccaggccgagttttggctgattcatcgccgtgcaaatcgcccatgcaaccatggcaaaaaagaccagcataccgaggcggaagcgacgacgcgcctgatcgggtttttgcgttaacggagaggcagcgctaactttcgtcattttcaccggaatgcggaacagcggcagcagggtgaatttagcaccgaagtaggagccgatggcggtggcgacggcaaagaaccaggcatgcagcgtgaactgcggaataccggtaaagaacgcggccagattacagcccatcgccaggcgggcgccaaacccggcaatgatgccgccgaccacggcctgcataatgcggatgcggcttttcggcatgcgcaacttaacgttgttggcccacagcgcggccgcaaaacagccgccgaacatgccaatgatcatcatcccgtcgatgcgggtcagcggtgtgccctcaagatggatcagtttgaagtagccccactcttcggcatggacgcctgccagctgtaatagctgcccaccccagcgggtaaactcgcccgtaacagcccagaaggtgccggtaataccgaaataataagtagagagaatgcctgccgcgataacggccggaacaggtgaccagaacttaaccaggtaagtctgtttgaaggaatgccatgacatgaataacctctgaactcagaagggtaacgctaaaaagagcccagatcatacgcttacgcgaaagtttggaaagtcattcacaccgaaaatatcgacaggatcaattttgacctgcttctttcaggaagagagaagggaaaaccgcctgacgccggggccagacggtgttaacggttacgccttgcgcgtggccgctttcatggatgtgacgaatgcgtgtaactcagccagcatctgctctggcttatccacgttcttctcgataattttcacgatagccgaaccggaaatggctccggcggctttcgcgtcaatcgccgcagtaacctgatccggtgaagaaatgccaaagccctgaagcggcggtgcagcatggtattctgccagcttctccaccagatgatgcagcggcagcgcggctttgttttccgcaccggtgacgcccgcacgggagagcaggtaggtgtaacctcgtccgtaagaggcaatctggcgcaacagatcgtcatcggcattcggtggacagatgaaaatcggcgcgacgttgtggcgcattgccgcctgacggaatggcgcagactcttcaacgggcacgtcagccaccagcacggagtcaacgcccacgcgggcgcactctgcgtaaaacgcatcaataccgcggctgaacaccagattggcgtacatcagcaggccgatcggaatggtcgggtgcttctgacggatcgccgccagcatttcaaagcactggctcggcgtcacgcccgcggcaaacgcgcgtagcgttgcgttctgaatggtcgggccatccgccagcggatcggagaacggaataccgagctccagcgcgtcggcaccggcatcaatcagggtgtcgataatcttcagcgactgctccgggccggggtcgcccagcgtcacgaagggaacgaaggcgccttcctggcgagctttcagttgtgcaaatgcgttgtcgtagcgttccatcagatttcccctcgtgctttcagaatatcgtgaacggtgaagatatctttgtcaccgcgaccggaaaggtttaccaccagcagctgctctttttccgggttttccttcatcattttcagcgcgtgcgccagcgcgtgggaagactccagcgccgggatgatcccttcattgcggcacagcgttttgaaggcctccagcgcttcgtcatcggtgatggagacataatccgcgcggccggtgctgttcaggaacgcgtgctgcggccctacggacgggaaatccagcccggcagagattgagtaagactcttcaatctgcccttcatcggtctgcatcatcggggccttcatgccgaagtagatccccacgcggccatgcttcagcggcgcaccatgctcgcccgtttcaataccgtggccggcaggctcaacgccaatcagcccaacgctggtttcgtcgataaaatcggcaaacatgccgatggcgttagatccgccgccaacgcaggcgatcaccgcatccggcaggcgaccctctttttcgaggatctgcgctttagtctcttcgccgatcatgcgctggaattcacgcacgatggtcgggaacgggtgcgggcccgcggcggtaccgagcatgtagnnnnnnnnnnnnnnnnnnnnnnnnnnnnnnnnnnnnnnnnnnnnnnnnnnnnnnnnnnnnnnnnnnnnnnnnnnnnnnnnnnnnnnnnnnnnnnnnnnnnnnnnnnnnnnnnnnnnnnnnnnnnnnnnnnnnnnnnnnnnnnnnnnnnnnnnnnnnnnnnnnnnnnnnnnnnnnnnnnnnnnnnnnnnnnnnnnnnnnnnnnnnnnnnnnnnnnnnnnnnnnnnnnnnnnnnnnnnnnnnnnnnnnnnnnnnnnnnnnnnnnnnnnnnnnnnnnnnnnnnnnnnnnnnnnnnnnnnnnnnnnnnnnnnnnnnnnnnnnnnnnnnnnnnnnnnnnnnnnnnnnnnnnnnnnnnnnnnnnnnnnnnnnnnnnnnnnnnnnnnnnnnnnnnnnnnnnnnnnnnnnnnnnnnnnnnnnnnnnnnnnnnnnnnnnnnnnnnnnnnnnnnnnnnnnnnnnnnnnnnnnnnnnnnnnnnnnnnnnnnnnnnnnnnnnnnnnnnnnnnnnnnnnnnnnnnnnnnnnnnnnnnnngcgcttcattacaggcatctttcagcgtggcagaaccgctgtgcaccgggatcacttccgcccccataagacgcatacggaacacgtttggcgactggcgctcaacgtccttcgcccccatgtaaatgcggcatttcagaccgagcagggcgctggcgagcgctgaggccacaccgtgctgtcccgcgccggtttcggcgatgatttcggttttacccatccgcttcgcgagcagcgcctggccaagcacctggttagttttatgcgcgccaccgtgcagcagatcttcacgcttaagatacagcgtagttttagtgccttcggtcaggttgcggcactttgtcagcgccgtcggacgaccggcgtagtttttcagcaggtcggtaaactccgcctgaaacgccggatctttctgtgcgctcacgaacgcttcttccagctggcgcagcgcgggcatcaggatttgtgggacatacatcccaccgaactcaccaaaatacgggttaagtaatgtcgtcatcttctcttccttaatatgcacgcagagttttaaataccgatgccagcttgctggcgtctttaatgcccggttgggactctacgcctgaattgaaatcgaggcctgcgcagccggttttggccgcttccacacagttatcggggcttaatccccccgccagcaggacattgtccagcacttcgccacgcagcagtgaccagtcaaaacgctgccccgtgccgccctggccgttgtcgagcacgtatttatcaacatgcttcaggttacgcgcgggcagggtggcgccaacgctttgcgctttccagatctgaacctgaggcgccagaacatgtcgcagagcatcgatgtacgcctgatcttcatcgccgtgcagctggaccgcgctcagggataacgcgtccgcttttgccgcaacgtcgttaatatccgcattgcggaacacgcccacgtagctcagaggcgcagccgccatcaccttgtgcgcctgttcctcattaacggcgcgaggagaggactcaacaaagatcagaccaccatagatcgcgcccgcttcatatgcggcctgcgcatcctgttcacgggtcaggccgcagactttgttctcacccaacagcacgcggcgcacggccgcattaaggtcttcgtgttccatcattgcggaacctatcaggaaaccgttggcaaagtggctgagttcgcgcacctgagcgtagctgttaatcccggattcgctgatcaccgtgacgcccgcgcccagacgcggcgcaagctggcgcgtacggttgaggtcaatcgacaggtcgcgcaggtcgcggttgttaatgccgaccactttggcttccagcgcgatggcgcgctccagctcctcttcgttgctcacttcggtcagcacgcccatattcaggctgtgcgcgacggccgagagctggcgatactgctcgtcattcagcacggagagcatcagcaggcaggcatcggcctggtaaaagcgcgccagccagatctgatacgggtcgataataaagtctttgcacagtatcggctgcggcgcgatgccgctgactacgggcagaaaatcgaagctgccctggaaatatttctcatccgtcagcacagaaatggcagacgcatgatgcttgtagataccggcaatacgcgccgggtcgaaatcgtcgcggatcacgcctttggacggagacgcttttttacactccagaataaacgcggtacgcgcgccctggagcgcatcataaaaacgacggctgctcggaacgacgtcattctgaaaactggcgagcggctgctgttgcttacgggcttccacccagatggccttatcggcgacgattttcgctaaaacggtctgcattatttaccctcttgccgcaagtgcggtaacgcgatcgtaagctgcaccggagcgcagtacgtccagaactttttgggcgttggctttcagatcttcctcgccatgtaaacgcatcagcatggctacgttggccgccacggcggcctcatgggcggcctcacctttaccttgtaataagcgcgtgagaatgtcacggttttcttccggcgtgccgcccgccagggtgtcctgatggtacggggtcaacccgaagtcagcggcctcaagctgatagttcagcacttcgccgttattcagttccgccaccagcgtgggcgcatgcagggaaacttcatccatcccgccgctgtgtaccacggcggcgcgttggtaaccgaggacgcgcagcgtctccgcaatcggcaggaccagttccgggctgtaaacgccaatcagcgccagcggcgggtgcgccgggttaatgagtggaccgagcacgttaaacagcgtgcgggttttgagctgctggcgaaccggcatcgcgtggcggaaaccggtgtgatacttcggcgcaaacaggaaacagacgcccaggtcatccagcgcttcacgggaacgctcggcgttcatgtccaggttgataccgaaagccgccagcaggtcggacgatcctgaacggctggacacgctgcggttgccgtgtttcgccaccttcagaccgcatgccgcggccacaaaggcgctggcggtggaaatattgatactgttactgccgtcgccaccggtcccgacaatatcggcaaacggatagtccgggcgcgggaacggggcggcattttccagcagcgcggttgccgcgccggcgatctcctgcgggctttcgccgcgtaccttcatgctcaccagcgcagcggccagctgctcaggcttcagctcgccgcgcacgacggcggagaacagctgatggctctcctgctggctcagggtctgagcctgatacagtttttccagaatcggttgcagggtgttggtctgctccagcttttgtagcgcccagtcgagcgtttgctccagcagacgcgcgccgttggacgtcaggatagattccgggtggaactgcatcccgcagacgcgatccgcatcgtgacgcaccgccatcaccatcccttcaaacgaggcgttaatggtcagcccggccggaatattgctgccgaccagcgagtggtaacgggctaccggaagcgggtttggcagaccggcaaacatcgcctgaccgtcatgttcaatacttgacgctttgccatgcaggatctcccccgcctgacccacgtaaccgccgtaggcttcgacaatcgcctggtggccgaggcagatgccgataatcggcagcttgccgcgcatacgggtcaacagctcaggcatacagcctgcttcgctcggtgcgcctgggcccggggagagcatcagcaccgggttttgcatggtcgccagacggtcaattagcgtctgggccggaacgtggttgcgatagataacgacattgtgaccattcgcacgcagctgatctgccaggttgtaggtaaaggagtcgatattatcgagcagcagaatgtcagccatcagaaaatctcctgtgcatggtgtgcggtagcaatggcgcgcagtaccgcgcgcgccttactgcgggtttcgtcggcttccgactgcggaacagaatccagcacaatcccggccccggcctggacggtggcaatgccgtcctcaacgtaggcggagcggatcacgatgcaggtatcaaggtcaccgtgagcggtgaaatagcccactgcaccaccgtagctgccgcgacggcgtccttccgcttcggcgatcagctgcatggcgcggactttcggcgcgccgctcagggtgcccatgttcatgcaggcgcggtaggcatgcagaacgtcgaggtcgtggcgcagttcacccaccacgcgggataccaggtgcatgacgaaggagtagcggtcgactttggtcaggtccgccacgtagcggctgccaggcgtacaaatgcgtgccagatcgttacgcgccaggtcaaccagcatcaggtgttcggagagctctttatggtcggtacgcatttccagttcgatgcggctgtcgagatcgcggtccagggagccatcggcacgacggccgcgtggacgggttcccgctatcgggtagatctcaatctggcggctggtggcgtcgtacttgagggagctttccggcgacgcgccaaacagggtgaaatcattgtcctgcataaagaacatgtacgggcttgggttgctctttttcagcacatcgtaagccgccagcggcgacgggcagggcagtgagaagcgacgggacggcactacctggaaaatctccccggcacgaatcgctttttgcatctgacgtaccaccgcgccgtactgatcgtcggtctgactcacctcgcaggtcatcttttcaacacgctgcaccgggagcgcgggcggtgcttctgacatctgctgttgcagttgggcgatgcgctgcgcgaggcgatttttctcagactcagacggcgtgaaaaggctggcctggatgcgggtatattttttctgatggtcgatcaccagcagggtttcggccaggtagaaacagtagtccgggcagcggtttccctgctcggtttccggtaaatcttcaaagccagcaaccaggtcgtaagcaaacagcccgccaaaaaacattgcttcgcgctcaacttccggcacggccaccagattttgcagcaggcgaaaggcgtcaaaaacggagagcgagcagaggcgggcatcctcatccagcagctggctcaccggcgggaaatgcagaatacgcaggtccgggtggcgttcattttcaatgcctgaaggcagcgccgcatccagcagcggcaggagcgacgcgccattgtcagacaacgccctgatagtgacggtgtcacctaacgcggtaatgcgcagcgcgctgtcaaccagcagcaggcttttgaggtcgtccttactgtcgatatcagctgactccagcagcagcgtcgcgggacgtgcgccgcacacctgatgaaacagcgcggtagggttatggcgataggccgcctcgcaggtcagcagttcgagatgaggtttggctgtttgcatgttgttgttctcatattctgttcaaaaaaaagcccgctgggtagcgggccgggtatctgtttgcatttctcagacgcgtgacactgcccgaagatcaggaagtacgccaccaaccgtgcagagcgaaatgtgctgtcattttcagatacctttctcgtgtgaacttacgtactagttaactagttcgatggcgtgttgtcaacccctgatttcagtatttcacggttagtcggtatcataggggcttcggatgtctccaacctgttatgggaagtgctttgagcgataccacctacgccgtaatttatgatttacacagccatacgcaggcttcagatggcctcctgacacccgaagccctggtccatcgcgccgttgaaatgcgtgtcggcacgctggcaataaccgatcacgataccactgacggcattcccgccgcgcgcgccgagattgcccgtagcggactggcgctggatctggtggccggggttgagatctcgacggtctgggaaaaccacgaaattcatatcgttggcctgaatatcgatacagaacatccggccatgcgtgcttttttgcaagaacaaaaaacacgccgcaatcaacgcgcggagatgattggcgaacgtctggaaaaagcgcatattcccggtgcgctggaaggcgcgcgaacgctggcgaacggtggggcggtgacgcgcggccatttcgcccgttttcttgtggatgccggtaaggcgacgaccatggcgaatgtctttaaaaagtatctggcgcgcgggaaaaccggatacgttcccccacagtggtgtacaataaaacaagctattgatgtgattcatcattctggcggtaaggccgtgctggcccatccggggcggtataatctttctgctaaatggctgaaaagactgctggcacactttgccgactgcggcggtgaggcgatggaagttgcccagtgtcagcaggcacccaatgagcgttcgcagctcgcgacctacgcccgtcagtttggtctgcttgggtcacagggttcagatttccatcagccctgcgcgtggattgaactggggcgcaagctctggttacccgcgggcgttgagcctgtctggcagctctgggaacagccacagcaaattgaagagagggaagtatgagtcagtttttctatatccatccggataacccccagccacgtctgattaatcaggccgtggagatcgtccgcaaaggcggcgttattgtctacccaaccgattctggctacgcgctgggctgtaaaattgaggataaagggtcgatggagcgcatctgtcgcatccgccagctgccggatggccacaacttcaccctgatgtgtcgcgatctctctgagctgtcgacctatgcttatgttgataacgtggcctttcgtctgattaaaaacaacacgccgggtaactacaccttcattctgaaggggacaaaagaggtgccgcgtcgtctgttgcaggaaaaacgtaaaaccatcggcatgcgcgtgccgtcgaacccgattgcccaggcgctactggaaaccctcggcgagccgatgctctccacatcgctgatgctgccgggcagtgagtttaccgagtccgacccggaagagatcaaagatcgtctggagaaggtggtggagctgattattcatggcggctatcttggccagcagccgaccaccgtggtggatctcaccgaagacgcgccagaagtgattcgtgaaggcgtgggcgatgttaagcctttcttgtaagggtgtaagcagatatactacgcggccatcaaagcagggcgccgccctgtttttgacctgattcgacgcctgtgaaggcgacacctgaggaagctcaatgagcgaaaagttacagaaagtgctggcgcgcgccggccacggttcgcgccgtgaaatcgaagccattattgaagcaggccgcgtgagtgtggacggtaaaatcgccacgctcggtgaccgcgttgaaatcgtaccggggctgaagatccgcattgacggccatcttatctccgtgaaagagtctgctgaacagatctgccgcgtactggcttactacaagccggaaggcgaactgtgtacccgcaacgatcctgaaggccgcccgacggtgtttgaccgtctgccaaaattgcgtggcgcccgctggattgccgtaggccgtctggacgtgaacacctgcggcctgctgctgttcaccaccgatggtgaactggcaaaccgtctgatgcacccgagtcgtgaagtggaacgtgaatacgccgttcgtgttttcggccaggttgatgagaacaaactgcgcgacctgtcgcgtggtgttcagctggaggacggccctgcggcgttcaaaaccatcaagtttaccggtggtgaaggcattaaccagtggtacaacgttaccctgacagagggacgtaaccgcgaggtgcgtcgactgtgggaagcggtcggtgtccaggtgagtcgcttgattcgcgtccgctatggcgacattctgctgccgaaaggcctgccacgtggcggctataccgaactggatctgacgcaaaccaactacctgcgcgatctggttggcctgacgccagaaaccacgtcgaaagtggcggtagagaaagatcgtcgtcgcatgaaggcgaatcaaatccgccgtgcggtgaaacgtcatagccaggtcagcagcaatcgccgctctggcagccgtaataacaacggttaattgaaaagcccggtgaatataccgggcttttttttcagtaatcaatcccaatttgcgctttgatacccgcatcgaacgcatgcttaaccggacgcagctcgctgacggtatcggccagctccagaatgtcccgatgacacccgcgccccgtgacgatcgccgtctggtgtgcagggcggttcctgagggcctccagcacggcttccagcggcaggtagtcatacgccaccatataggtgatctcatccagcaacaccatgttcagcgacgggtctgaaagcattcttttggcatgctcccagacggcgaggcaggctgcggtatcggtttcccggttctgggtatcccaggtaaaaccggttgccattacctgaaactcaacgccatgcggctcgagcagattacgctcgccgttgggccattcacccttgataaactggatcacgcccactttctgcccatgcccgactgcgcgggtggcggtcccaaatgcggcggtggttttgcctttgccgttgccggtgaacacgattaggataccgcgctcgtcctgagcggccgccacgcgtgcatcaacctgttctttcagacgctgctggcgttgctgatgacgatcatcactcattgcgatatccccggtttgcggcctggctgggcatcgaaggtcaatccggttttgcgacggctgtcgtcacccatcagccacaggtaaaggggcatgatatcggccggggttttaagcttctgcggatcttctgtcgggaaggcgctggcgcgcattttggtgcgcgtaccgcctggattaatacagttaacccgcaggtggcggctttggtactcttcggccagcacctgcatcattccttcggtggcaaattttgagacggcgtaagccccccagttcgcacgcccctgacgccccacgctggaggaggtaaataccagcgagccggaatcggagttgagtaataaaggaagcaaggcctgggtcaggaaaaacgtcccgttgacgttaacctgcatcacctgttgccaaatttccggatcctgctcatccatcgggcgcacttcgcccagtaaccccgcgttgtgcagtacgccgtccagacgcggataatgtgtgctgatccgctgggcaagggcctgacatgacgctggcgtgcaggtcagcagatcgagcgtataccagggcgtgggggtaccgccggcattttcgatttcacgggcgacggccttgagcttttcttcattacgtcccagcagaataaggctcgcaccgtattcagaataggtcagcgccgcttcgcgaccaatcccgtcgctggcaccggtaaccagaatgatgcggttctgtagaaggtttttttgtggctgataatgcacggtggctcctcaggcgcattgggcgtgacttgcacctttatttatgacttttcggctttatgcccgaaacagcgtcagaattcaatcagtctacaggacagatcgctggtaaattaacaatttgcaaagatttaaaccagaaacgggggattcctgaagccgcctcgcagaggtaatgtccagagcgagacgcctgcacagggctgttgtacactggcgtgaaagattcgtggttaaatcaaggtggaacgcgtggaattactttctcagtatgggttgtttttggccaaaatcgcgacggtggttattgctgtcgcggtgattgccgtcctgattgtcaacctgacgcagcgtaagcgtcagcgtggtgagttacgcattacccgcctgagcgagcagtataaagagatgcaggaggagatgtctctggcgctgcttgacgatcatcaacagaagctgtggctaaaagcccagaagaaaaaacataagcaggacgccaaagccgcgaaggcgaaagctaagctcgccacgccacaggctgacgcaaaaccgcgcgtctatgtgctcgattttaaaggtagcatggatgcgcatgaagtctcctctctgcgtgaagaagtgacggcggtgctggccgtggcgacagcccaggatcaggtggtggtacgccttgaaagcccgggcggcgtagtgcatgggtatggactggcggcttcgcagttacaacgtctgcgggataaacagatcccactcaccgttgcggtagataaggtcgcggcgagtggcggctatatgatggcgtgcgtggcggataaaatcgtcgcggcaccgttctccattatcggctcgattggggtggtcgcgcagatccctaacttcaatcgtttcctgaaaaataaagagatcgacatcgaactgcatacggcgggtcagtacaaacgtacgctgacgctgctcggcgaaaataccgaagagggacggcagaaattccgggaagatctgaacgaaacccaccatctgttcaaagatttcgtgcaccgcatgcgcccaacgctggacattgagcaggtggctacgggcgaacactggtacggcacgcaggcgcaggagaaagggctggtggatgaagtgggtaccagcgatgacctcctgctcaacctgatggaaggccgtgagctggtgggggtgcgcttcacccgacgtaagcgcctgctcgaccgttttaccaatagcgcggcagaaagcgcggatcgcctgctgctacgctggttgcagcgcggccaaaagccgctgctgtaaagaaaaacgcgaggcagatgcctcgcgttttcgtattaatcgaccaggtggtacttctctgagagggtatgcgccaggtatttaaacatgttaaacacggcggtgcttttcggggtgggtagcccttgttcatcaaggaagtattcaccgctgaacaccagcacgccattacgttgttccacgccagtcgcttcaattcccgccagggtgtcttcatggtcgcgaatgagtttgtttgcttcgataagcaatgaagctcggtcaatgggttgggtcgtattctgcatattccactccttaaacagtgacaatagtctacgcctgggtcgcttcgggggcaaattttccctgttatccgaggggataagaaacaggggctggctggcgggatttgcttttgcatgctaataaagttgcgtaacgaattttatcaggtacagtgtgcgctttcgtcattctggcaacagaattgcttgacattcgaccgggaattcgtcacgaatgaactttgatgtgagaaaaatacccgaaaactcaatgacctggatgtcgccattctgacgttcggtaacacataggggttgatatcccctgacgatgtcgcaatatcaatggctcgtcgtcagcggaagggaaatcaacgtgcggcgtattcctggaagaattaaattaggtaaaggtgaatatgggtaaagctctcgtcatcgttgagtccccggcaaaagccaaaacgatcaataaatatctgggcaatgactacgtggttaagtccagcgttggtcacattcgcgatttgccgaccagtggctcagccagcaaaaagagcgcagactctacctccaccaaaggggctaaaaagcctaaaaaggatgaacgtagcgcgcttgtcaaccgcatgggtgttaacccatggcacaactgggatgcacattacgaagtgctgccaggcaaagaaaaagtcgttaacgagctgaaacagcttgctgaaaaagcagaccacatttatctcgcaaccgaccttgaccgcgaaggggaggccattgcatggcacctgcgggaagtgatcgggggtgatgacaaacgctacagccgtgtagtgttcaacgaaattacaaagaatgcgattcgtcaggcgtttgaaaagccgggtgaactgaatatcgaccgtgttaacgctcagcaggcgcgtcgctttatggaccgcgttgtaggctacatggtctcgccgttactgtggaaaaaggtcgctcgcggcctgtctgcggggcgtgtgcagtctgtggctgttcgtcttgttgttgagcgtgaacgcgagatcaaagcgttcgtcccggaagagttctgggaagtggatgcgaatgtcaccacgccgggcggcgatgcgctgccgttgcaggtgagtcaccacaacgacaaaccgttccgtcctgagaatcgcgatcagactatggccgcggtggcgctgctggaaaaagcgcgttatcaggttctggatcgtgaagacaaaccgaccagcagcaagcctggcgctccgtttatcacgtcaactctccagcaggcggcaagcacgcgtctgggttacggcgtgaagaaaaccatgatgatggcccagcgtctgtatgaagcgggttacattacctacatgcgtactgactccaccaacctgagccaggacgctgttaacatggtgcgcggctatatcgaggacaacttcggtaagaaatacctgccggaaagtcctaatcagtacgccagcaaagagaattctcaggaagcgcacgaagcgattcgtccttctgacgtttccgtcctggcagaatcgctgaaagatatggaagcggacgcccagaagctgtatcagctgatctggcgccagttcgtggcctgccagatgacgccagcgaaatacgactcaaccacgctgaccgttggtgcaggcgacttccgcctgaaagcgcgtggccgtattctgcgcttcgacggctggaccaaagtgatgcctgcgctgcgtaaaggtgatgaagacagaacgctgccttcagtcaacaaaggtgacgagctgtcgctggttgatctggtcccggctcagcacttcaccaagccacctgcgcgcttcagcgaagcatcgctggtgaaagagctggaaaaacgcggcatcggtcgcccgtccacctatgcgtcaatcatttcgaccattcaggatcgtggatacgttcgcgtcgagaaccgtcgtttctatgctgaaaaaatgggtgagattgtcaccgaccgtctggaagcgaacttccgcgagttgatgaactatgacttcaccgcgcagatggaagacagcctcgatgaggttgccagccataaggcagagtggaagaaagttctcgacagcttcttcagcgattttaccaatcagcttgagaaagccgagaaagatcctgaagagggcggcatgctgcctaaccagatggtactgacgagcatcgactgcccaacctgcggccgtaaaatggggatccgtaccgcgaccacgggcgtgttcctcggttgctctggctatgcgctgtcgccgaaagagcgttgcaaaaccaccatcaacctcgtgccggagaacgaagttctcaacgtgctggaaggtgacgatgcggagaccaacgcactgcgtgccaaacgccgctgtaagaaatgcggcacggcgatggacagctacctgatcgatcccaaacgcaaattgcacgtttgtggcaataacccgacctgcgatggttatgagatcgaagaaggtgagttccgcattaagggctatgacggtccaatcgttgagtgtgagaaatgtggttccgaaatgcacctgaaaatgggacgcttcggtaagtacatggcatgcaccaacgacgactgtaaaaacacgcgtaagatcctgcgtaacggtgaagttgcgccgccaaaggaagatccggttccgcttcctgagctgccgtgcgagaagtcagacgcgtatttcgtgctgcgtgacggcgctgccggggtattcctggcggccaacaccttcccgaaatcgcgcgaaacccgtgcgccgctggtagaagaactgtaccgcttccgcgaccgtctgccggagaaactgcgttacctggccgatgcgccacagcaggatccggaaggcaacaaaaccgtggtgcgcttcagccgtaaaacgaagcagcagtacgtggcggcagagaaagagggcaaagcgaccggatggtcagccttctttgtcgacgggaaatgggttgaaggcaagaaataatcttcccttaccgtaacttacctgtaaaagggccggacttccggcccttttttattacgtagttattattttttgttccgtactatacagcctggctataaatgatatagtggttatagttaacccgtttcttattatcaaatcgtcttaagcgattgacgcatgcgctaaatcggatggtctggcatgaaattacagcagcttcgctatatcgttgaggtcgtcaatcataacctcaatgtctcttccaccgcagaaggtctttatacctctcagcccggcatcagtaagcaggtgcgtatgctggaggatgagttaggtatacagatatttgcccgcagcggtaagcacctgactcaggtcaccccggcaggacaggaaatcatacgcatcgcacgggaagtgctctccaaagtcgacgccattaaatccgtcgccggggaacatacctggccggataaaggctctctgtatattgccaccacgcatacacaggcgcgttatgcgcttcccggggtgatcaaaggcttcatagaacgctatccccgcgtttccctgcatatgcatcagggctcaccgacgcaaatcgcagaggccgtgtctaaaggcaatgcagacttcgctatcgcgacggaagcgctccatctgtacgatgatttggtcatgctcccgtgctaccactggaaccgctctattgtcgtgaccccggatcacccgctggcggggaagggcgaagtgacaatcgaagaactggcgcaatacccgctggtgacctatacgttcggctttacgggccggtctgaactggacaccgcgtttaaccgcgccggattaacgccacggattgtctttacggcgacggatgcggacgtcataaaaacgtatgtgcgtctgggcctgggcgttggggttattgccagcatggcggtggatcctgtctcagacccggatctggtgcgtctggatgcgcatgatattttcagtcacagcaccaccaagataggttttcgtcgcagcacgttcctgcgcagctatatgtatgattttattcaacgctttgcgccacatttaacgcgcgatgtggtggatacagctgtggcgttacgctccaatgaagacatcgaagagatgtttaaagacattaaacttcccgccaaataatcactcccggtatctttctcttgcggaaagataccgtcattccgctttaaacctgaattagaattatcatcatctacgcccactgtcatatatcgtcataacccatttgatgactatggttttactgtcgcaaatttgcgacaaaagtagaaactaatttacagctgtgcaaattattcttttcaattatttatttcgggtcaaaagattgaattttcccgggctcggatacgtaaattcactggcttttcggctaaagtttctttaggatttatctcatcagatgattacttgtgccaattgtttggtctctaaatgataagcgatatcgattgtatgaggttagcaatgccgtcaggaagtgaagaaccgcaaagggatcccgcgcttaagcgtaaagcctggctggcggtctttcttggctctgccctgttctgggtggtggttgctcttcttgtctggaattactggggttgattatggtcatgacggtgcgtacagaagcgagaaaagagatgtgtcagcttcgtgacaatgctcacaaagcccgtaaggcgccagcaaccagcgtgccagcttcctggaaactgacgccgcagcagcaggcctttattgatgtgttcgcggaagacgaacccaaaaaacaataattttgatttttgcgtaatgatgcaaatagtctgaatatagaccgtgcacttttgtactccttaataaatacacatcagcaatatagaacgagggcagacctcgcaaccttaaataattaaagtctggtgtccctatgatgaataacatgacaaccgtaaaatactggtcatggctcggcgtattctcagcgtcgatcctcttctggtgtcagctcctctggctggccttgcactaaatcgtaaaacctcgccacggcggggttttttgttttatccctcgcgttagaccattcctaaatttatcaatttgggttgttatcaaaacgttacgacatctttgtgttatctttaattacagccctgatgattgtcaggacatccctgtttttaaggaggagcttatgtcgttaaccctacgcgaagccagtaaggacacattacaggcggaaaataaaacctggcgctactacagcttatcgctggctgccagaacgcttggggacattcgtcggttacccaagtcgttgaaagtcttactggaaaacctcttgcgctggcaggatggcgactcggttaccgaggaggatatccaggctctggcagggtggctgaaaaatgctcatgcagacagagaaattgcctatcgcccggccagggtgctgatgcaggatttcactggcgtgccagcggtggtggatttggcagctatgcgtgaagccgttaagcgtctcgggggcgatacagctaaggttaaccccttgtccccggtagacctcgtcattgaccactccgtcaccgtcgatcactttggtgacgacgatgctttcggcgaaaacgtccgtctggagatggaacgtaaccatgaacgctacgtatttctgaaatggggtcagcaggctttcagccgcttcagcgttgttccaccgggcactggcatttgtcaccaggtcaacctggaatatcttggcaaagccgtctggagtgaattgcaggataaagagtgggtggcttaccctgatacgctggtgggcaccgattcacacaccaccatgattaacggccttggcgttctgggctggggcgtcggtggtattgaagcggaagcggccatgctcggccagccggtatcaatgctcattcccgatgtggtgggctttaagctgaccggtaaattgtccgaaggcattaccgccacggatctggttctgacggtcacccagatgctgcgtaagcatggcgtggtgggcaaattcgttgaattttatggcgatggtctggattcactgccgctggcggaccgggccaccatcgccaacatggcgccggaatatggcgcgacctgcggctttttcccgattgatagcgttacgctggagtatatgcgcctcagtggtcgcagcgaggagcaggtggctctcgttgaggcctacaccaaagcgcagggcatgtggcgtaacccgggtgacgagccggtatttaccagtacgctggagctggatatgggcacagttgaggcaagcctcgcagggccaaaacgtccgcaggaccgggtcgccctgagcaacgttccgaaagcctttgccgccagcaatgagctggaagttaacgccgcacaaaaagatcaccgtccggtggactatgttctgaacgggcatcagtatcagctccctgacggcgccgtggtgatcgccgctatcacttcctgtaccaacacgtccaacccgagtgtgttaatggctgccgggctgctggcaaaaaaagcggtagagcttgggctcaagccacagccttgggttaaagcctccctggcgcctggttcgaaagtggtatccgattacctggcacaggccagactcacgccttacctcgacgagctgggctttaacctggtgggctacggctgtacgacctgcatcggtaactctggtccactgcctgaacctattgaaatggcgatcaagcagggggatttgaccgttggcgcggtactttccggtaaccgaaactttgaagggcgtattcatccgctggtgaaaaccaactggctggcctcgccgccgctggttgtagcctatgcgctggccggaaacatgaacattaacctggcgaccgatccgattggtcacgatcgcaaaaatgaaccggtctatctgaaagacatctggccatcatcgcgcgaaattgcgcgcgcggtagagaaagtttccaccgagatgttccgcaaagagtatgcggaagtgttcgaaggcacagcggagtggaaagcgatcgacgtagtgggttccgatacctatgactggcaggatgattccacctatattcgcctgtcgccattcttcgacgaaatgctggcggagcctgcaccgttgaaagatattcacggtgcgcgcattctggcgatgctgggcgattccgtcaccactgaccatatctcccctgcgggtagcatcaaggcggacagtccggcaggtcggtatctgcaaagtcgtggcgtggaacgtcgcgatttcaactcctacggttcgcgccgcggtaaccacgaagtgatgatgcgcgggacctttgccaacatccgcattcgcaatgaaatggtcccaggcgtggaagggggtatgacgcgccacctgccggatacagaggtcatttcaatttatgacgcagccatgaagtatcagcagcagggtacgccgctggccgttattgccggtaaagagtacggctccggttccagtcgcgactgggcggcaaaaggtccgcgtctgctcggggttcgcgtggtgattgccgaatcctttgaacgtatccaccgctcaaacctgatcgggatggggatcctgccgctggagttcccgcagggtgtaacgcgtaaaacgctgggtttgaccggggaagagcagattgatatcagcggtctgcaaaatctgcaaccgggtaaaaccgttccggtgaagnnnnnnnnnnnnnnnnnnnnnnnnnnnnnnnnnnnnnnnnnnnnnnnnnnnnnnnnnnnnnnnnnnnnnnnnnnnnnnnnnnnnnnnnnnnnnnnnnnnnnnnnnnnnnnnnnnnnnnnnnnnnnnnnnnnnnnnnnnnnnnnnnnnnnnnnnnnnnnnnnnnnnnnnnnnnnnnnnnnnnnnnnnnnnnnnnnnnnnnnnnnnnnnnnnnnnnnnnnnnnnnnnnnnnnnnnnnnnnnnnnnnnnnnnnnnnnnnnnnnnnnnnnnnnnnnnnnnnnnnnnnnnnnnnnnnnnnnnnnnnnnnnnnnnnnnnnnnnnnnnnnnnnnnnnnnnnnnnnnnnnnnnnnnnnnnnnnnnnnnnnnnnnnnnnnnnnnnnnnnnnnnnnnnnnnnnnnnnnnnnnnnnnnnnnnnnnnnnnnnnnnnaacgacggcattttacattatgtgattcgtaagatgctggactgatcaaactcgcccggcacatgtgccgggcgttttgcgtttactcgctcagcagatgccccattttggcagctttggtatcgaggtagtgcgcgtttttcgggttgcggccgacaatcagcggtacgcgttccacaatattgatgcccgcttcagtgaggatttccacttttttcgggttattggtcaacagacgcacttcgtccacgcccagcagcttgaacatatccgcgcacagggtgaaatcgcgctcgtcagcagcaaagccgagctgatggttcgcttcgacggtatcgtagccctgatcctgcaacgcataggcgcggattttattcagcaggccaatattgcgaccttcctgacggtgatacagcagaacgccacgtccttcctctgcgatatgagaaagggcggcttcaagctgaaaaccgcagtcgcaccgcagactgaacagcgcgtcaccggtcagacactctgaatgaacgcgggacagcaccggcgtttgccccgaaatgtcgccgaacaccagggcgacgtgatcttgcccggttgccagttcttcaaaacccaccatcaggaaatcgccccatggggttggcagtttggcttctgccacacgtttaagctgcatgtgattctccagaccaggctgacacgtttcgtgcctttgccccattatgctttctgtatcggactattttgccacaagcccggcaacttcacctaatcaccaccacgctttacaaacgttaaacgcacaatccgacatatccaccagaatgatgaaattcagttatgattgtggtgcttagtgaaaaaggagaggacatgctttcaattgccagacgaacggccgcaggagccgccgtattgctcgttatacccctggtcgtttggttctccggctggatgtggcagcccggacaaaacgagacgtggctgaaagccttatactggataaccgagacggtcacccagccgtgggggattattacgcacgtgttgctctgtggttggttcctgtggtgcctgcgctttcgccttcgcgcggcgctggtactgttcgctattctcggcggcgccatacttatcgggcaaggggtgaagtcgtgggtcaaggatcgcgtgcaggaaccccgtcctttcgtcgtctggctggaaaaaacgcatcatgttccggtggatgagttctacaatttaaagcgtaaagatcgcggtgcgttggtaaaggagcagcttgcagaacagcaggatatcccgacctttttacgcaaacactggcaaaaagagaccggctttgcgtttccttccgggcatacgatgtttgctgccagctgggcgctacttggcgtgggactgctgtggccgcgtcggcgtaccctcacgattgcgattttgctggtctgggcgacaggcgtaatgggcagccggatgctgctggggatgcactggccgcgtgatttggtggttgcaacgctgatctcgtgggtactggtgacgctggcgacctggcttgcacaacgtttttgtggaccattgacgccgccgccggaagagaaggaagaaatagccgaaagggagtctggcggaacctgaaggttgatattccgcattttgaccataaatccatgtagggcgcgttactttttccatttcgcgcccgccactaaaatggtagcttataaggctgattgcagtgatttgaacacgctttatacgctcgaaccacataacgggaagtcatgtgaaatatttactcattttcttactggtgttggcgatttttgtcatttcagtcacattgggcgcgcaaaacgatcaacaggtaagttttaactatctgctggcgcagggcgagtaccgggtgtcgagcctgctggcggtgttattcgcggcgggttttgtcatcggctggcttgtatgcggcctgttctggcttaaggttcgtgtttctcttgttcgcgctgaacgtaaaattaaacgacttgaacatcaacttacgcctgcgtctgacattccggcgagctctggtgtgccggtagtcaaggaataatcgaatatgctggagttgttgtttctgcttttgcctgtcgccgcagcctatggctggtatatgggccgcagaagcgcgcaacaaacaaaacaggatgaagcaaaccgactctcccgtgactacgtagcgggggtgaacttcctgctgagcaatcagcaggataaagcggtggatctgttcctcgacatgcttaaagaggataccggcaccgtagaggcgcatctcaccctgggaaacctgttccgctcgcgcggagaggttgaccgtgccattcgtatccaccagaccctgatggaaagcgcttcgttgacctatgagcaacggttgctggccgtgcagcagcttgggcgggattacatggccgcggggctttacgatcgcgccgaggatatgttctctcagctggtggatgagacggacttccgtatcggtgcgcttcagcagcttctgcaaatctatcaggccaccagcgactggcaaaaagcgattgataccgccgaacgcctggtcaaactcggtaaagacaaacaacgcgtcgaaattgcccacttctattgcgagctggctctccagcagatgggtagcgatgacatggataaagccatggcattgttaaagaaaggcgctgcggccgatcgcaacagcgcacgcatctcgatcatgatggggcgggtctttatggctaacggtgattacgccaaagccgtggagagcctgcttcgcgttatcgaccaggacaaagagctggtcagcgaaacgctggaaatgctgcaaacctgctatcagcagttaggtaagcaggacgagtgggttgcgtttctgcgtcgctgcgttgaagaaaacaccggtgccacagccgagctgatgctgtcggatgtcgtcgaagagcacgaagggagtgataccgcccaggtatacattacccgccagttgcagcgtcatcctaccatgcgcgtcttccataagctgatggattaccaccttaatgacgcagaagaagggcgcgctaaagagagcctgatggtgctgcgagacatggtgggtgaacaggtgcgcagcaaaccgcgctatcgctgccagaaatgcggcttcaccgcctattcgctctactggcattgcccttcgtgcnnnnnnnnnnnnnnnnnnnnnnnnnnnnnnnnnnnnnnnnnnnnnnnnnnnnnnnnnnnnnnnnnnnnnnnnnnnnnnnnnnnnnnnnnnnnnnnnnnnnnnnnnnnnnnnnnnnnnnnnnnnnnnnnnnnnnnnnnnnnnnnnnnnnnnnnnnnnnnnnnnnnnnnnnnnnnnnnnnnnnnnnnnnnnnnnnnnnnnnnnnnnnnnnnnnnnnnnnnnnnnnnnnnnnnnnnnnnnnnnnnnnnnnnnnnnnnnnnnnnnnnnnnnnnnnnnnnnnnnnnnnnnnnnnnnnnnnnnnnnnnnnnnnnnnnnnnnnnnnnnnnnnnnnnnnnnnnnnnnnnnnnnnnnnnnnnnnnnnnnnnnnnnnnnnnnnnnnnnnnnnnnnnnnnnnnnnnnnnnnnnnnnnnnnnnnnnnnnnnnnnnnnnnnnnnnnnnnnnnnnnnnnnnnnnnnnnnnnnnnnnnnnnnnnnnnnnnnnnnnnnnnnnnnnnnnnnnnnnnnnnnnnnnnnnnnnnnnnnnnnnnnnnnnnnnnnnnnnnnnnnnnnnnnnnnnnnnnnnnnnnnnnnnnnnnnnnnnnngcagtaattttttaaaacgctgtactttagttacaacatactaatggttgcagtgatttcgtcagcactgtgcggtctggggttcagcaggaaaagcattcgattctgttcatttaccccgagggcaggtagaatgcacgccgtttatctgttccgcgccgctgcgcgcccatagacgaaaagggctggtcatgacgtctgttacatcctccacttcccgcgtagttaccgattctcccgtagttgttgctctggattacaataaccgtgacgccgcactggcctttgttgatggcattgatccccgcgattgccgtctgaaagtaggcaaagagatgtttacgctgttcggcccacaaatcgtccgcgatctgcaccagcgtggcttcgacgttttcctcgacctgaaattccatgatatcccgaataccactgcgcacgccgtagctgcggcggctgaactgggcgtgtggatggttaacgttcatgcatccggcggggcacgcatgatgacggctgcgcgcgaagcgctggtgccgtttggcaatgacgctccgcttctgatcgccgtcaccgtgctgaccagtatggatgaatccgacctgcgtgacctgggtgtgacattgtcacctgccgaacacgcggagcgtctggcgcgcctcacgcaacagtgtggtctcgatggcgtggtctgttcggctcaggaggcggttcgcttcaaagctgagctaggccgcgactttaaactggtaacgccgggcatccgtccggcaggcaccgagtctggggatcagcgacgcatcatgacgccagagcaggcgctgagcgcgggtgtagactatatggtgattggtcgcccggtgacgcaatccgctcatccggcagagaccctgaaagcgattaatgcatcactgaaaaagggggcataatgcgtgacgccaacagtcgtctggtctattcaacggataccgggcgcattgaagagccaaaagagaaagctgaacgtccaaaaggcgatggcatcgtgcgaattcagcgccagaccagcggcaggaaaggtaaaggggtttgccttgtcactggcattgatctggatgatgcagacctggtaaagctcgccgctgaacttaaaaagaagtgcggatgcggtggggcagtaaaagacggcattattgagattcagggtgataaacgggatttaattaaagcgctgctggaagccaaaggaatgaaagtcaaactggcgggcggctaaaataaatgagccacggacattgccgtggctctttttttacgtgcgtaagtcagacctgaaaatacaaaatatattattataccggtgagagccgttatggtgattatttgcccacctggtgaccgataacaccacctacggcagcaccacctaatgtacccagcgtactaccatccgttaatactgcaccaccaagcgcaccagcaccggcaccaatcgcggtattacggtcacgtttagaccagttagagcaagcgctcagggacattgctacagtgattgccagaacagcggcggctaattttttgctggtaaaggtcataatactttctcctgaattatcgattcacggaaaggaatgcactttaagtatagacaatatccatacttaaattctgttcccgtgaaagctggtcgcgcaggcgtttcatcatcacgcaggtgatagtcacttcctgttatatcgctaatattaattttacgtgtttagaacggtttcaacaggtaaaaactcttaaaggcagggtcggaatactctcagagaaaggtttaagtgcgcccattattcgggcgcagcaggataatcaggccgtttttttcacaatatcgacagtcaggccgtcttgttctaattgctggcgatattcatcgcgcaaacgctcatccgtgatcacgcggctgaagcgcgaagccggacccatcgtataagggtgtacggcgccaaacttagagctgtcggtcagcactatcgcttcacactctttggcgagtacggcgttaaccacgtctgaacgcatcatgtcgcgaccagtaaagccggtgtcgggctgccagccgtcaataccaatgaatgccttactgaagtgaacctgctgaacatattgacgcgttaatggccccaccatgctttcgcttttcttctggtaaatgccgcccagcagtatcacctcgcactgagtttccttcaacagatgggcgatatagctgcttacggtgatgatggtaacgtctttttgatcggcgagcgtgcgcgccagaagggcgttactgctgccattttcaataaagacggtctcaccgttattcactaaggatgcagcaaactccgccagctcccgcttgagcgcataattgttcatcatgcgggtttcgacgtcgtcactgtccagtggaacggcatatccgtgcgcacgccgcaggtagctctgtttttccaggagattcagatcctgacgaatggtgacttcagaaacgccggtggctttagcgagatcgaccacgcttacgcgtccctgatcgatcaccatctgcaaaatgatttgttgtcgggaattcatagcatccatttaaaaggcaagggcgaaaacgacgtggttacacttcccacggggctttaggttgagtggattctggagcgttttctgcgccgttctcagccagcagttcagacttgaggatctcaagattacggatagcagagtgataatcgcctgcgacaagaatatccagcacagtatcaatacgctgtgccacggctgttgcatcaatgttagacataagctcaccctgaagcgaaaagttaatattatcaatgatgcagaaaattgattcaaaagagaaggtaaaaaatgcaataaccaaagttcataaatgaaagtgataaatttggcccccgtatgctgcgggttgtaggggtggattagtctaaaactgcgcgcaacgcgcttttttatgagaggaattcgactatgacagttatcaaccagacaacctgcacattgtttactgatgctgaacgattcactcaactggcggcttattatgaggccgaacggcgtacggtgtggatgatgttacgtgccacgccacggccttgcttcaatcatgcgctgatcgaggagatcatgaatctctcctggctggttcgacagtcaggatttgtcgttgatttttgggtcaccggatcgctggtccccgacatctacaataccggcggtgatttacagttcttcgttgagtgcatcaaaaacaaccgacgcgaagcgttacgcgcctatgcccgggcctgtgtggactgcgttcatgccgcctcgcgagggtttgataccggtgctgtcacgctggctatggtggaaggaagcgcgttagggggcgggtttgaagccgcgctggnnnnnnnnnnnnnnnnnnnnnnnnnnnnnnnnnnnnnnnnnnnnnnnnnnnnnnnnnnnnnnnnnnnnnnnnnnnnnnnnnnnnnnnnnnnnnnnnnnnnnnnnnnnnnnnnnnnnnnnnnnnnnnnnnnnnnnnnnnnnnnnnnnnnnnnnnnnnnnnnnnnnnnnnnnnnnnnnnnnnnnnnnnnnnnnnnnnnnnnnnnnnnnnnnnnnnnnnnnnnnnnnnnnnnnnnnnnnnnnnnnnnnnnnnnnnnnnnnnnnnnnnnnnnnnnnnnnnnnnnnnnnnnnnnnnnnnnnnnnnnnnnnnnnnnnnnnnnnnnnnnnnnnnnnnnnnnnnnnnnnnnnnnnnnnnnnnnnnnnnnnnnnnnnnnnnnnnnnnnnnnnnnnnnnnnnnnnnnnnnnnnnnnnnnnnnnnnnnnnnnnnnnnnnnnnnnnnnnnnnnnnnnnnnnnnnnnnnnnnnnnnnnnnnnnnnnnnnnnnnnnnnnnnnnnnnnnnnnnnnnnnnctggcccagcgcgatgcccaattaggctttccggaaatcgcgttcaatctgttcccgggcatgggcggctattcactggtggcgcgtcgcgccggcatgaaaatggcggaggcgctgatctacaaaggtgagacgcatacggcggaatggtatgagcagcatggtcttgtggatctcttattcgagccgttacagagctatgtttcggtgcggacgtttatcgacacgctacagccgaagctgaacggcgtaagggccatgctgcgtgcgcgtacgcgcgtgctgccacttccgcgaagcgagctgatggacattaccgaggattgggttgatgccgccttctgccttgaaccgaaggatatcgcctacatggagcggctggttatgctgcaaaatcgccatcaggcgacgggcttacgcaaagccagctaacggacatttctggcctgatagcgctttagccatcgctcgaatgcggcagcgggcatgggcttagcaaaaagataaccctgccgttcgttgacgccattcttcgtcagaaaggcgtcttcttttgcactttccaccccttcagcaatgacctgcaaatttaacgcctgcgccacggcgactatcgcacgcaccagcgactgtgaaatggactgcttatggatgtcccgcacgaaagcctggtcaagcttaatggcatcgatagggaagcgcgccagctgcgacagggaagagtaccccgtaccaaagtcatccaggtgaatttgcgctcccaggcggctaaactgctggatcactgacagggccagctcttcattttcaatgagacagctttcggtcaattccacgtcaatcgggcagtattcaaaactcaggtctttcagcgcctgcttcaggtcgctgaagatggtctggtccgccagctgacgggcggagacgttgaccgcgacgcgaaggctgatccccttgtcgcgccatttcgccacctggcgcaccacatcaagcataacccagcggcccaggggcacaatcagccctgactcctcagcataggagataaattccatcggcgggatcaggccacgctctggcgactgccagcgcaccagcgcctccagacttctgacttcgccgcgccaggttattttgggctggtagtggattaacagctgatcgttatccagcgctttacgcaggttggtatccagccacaggtattcaaatacgcgctggttcatctctggcgagaagacgcagaatttgccccggccattttctttggcggtgtacatggcggtgtcggcattacgaatgacgctttcgcgatcgttaccgtgctggggcgcaagcgcgatgcccagcgagcagccggtgtaaacctctatcagcccgatgcggaaaggctgacgaagtcgggtcagtatgcgcgatgccatggcttccagcgcgccctgcgaggtatcggtggccagcacgataaactcatccccacccaggcgcgccagggtttgtccttcgtccaggcagctcaggatcgccagcgcaacggcctgtagcagctggtcgccaaacatatgcccataggcatcgttctacttttttaaagttatccagatcgagataaaccacgcctacctgggtgtcaccccgagcggtgatggcatcagagatcagctcatggatggcgtttcggttaggcaaaccggtaatcgtatccgtattggcgagtacgcgcaggcgctcctgggcccgacgctcttcggttatatcggtacctgaacagatgaggaagatttcatttttcccgctgccgctgtgaacaaatttatttctgaagagaaacaggcgctgccctttgcgggtcttgatccagcgttcaacttcgtacgagctgccgttacgaaaaaaaccggtgatgttgcgtttggaggccgcggcttcgctacgactcataaacagtttgaacacgttttgcccgataacttcctgttccttcaggcccgtatattcttcacttaaacggttgaagcgctgaatattcccgttctggtcgaggatcacaatcacggagttagcctcggacactacctgttcggcgaaggagagcccctgcgccaggtcccgcgccacggaaggagtatcgttccaggctgatgccgttcctgcccactcatttttgttaattttacggccgacaagatgaacgggaacgtccacaccgtacaagggcagggtcatggcaatgctggaggttatcacggtgagctggcggatcagcgcggcctgctcatcatccagcgcaaccacctgaatgatgtcagcgctttcactggcagcaagatgcagagcattgctgtctgctgtcagtcgccaccaggggctatgcgtacccatgtaacgaaacagcaaattctgctccagatcgtccatcacgttttctcccgcggctgctgagtagcgcacaaattattcatttgcagtcgacaatgacggctctcttttactgtagataattctggcgaaatgtggcgatgggaaacagaaaagtgtgagaaaaaacgatgattttgcgggagataattcaggtgagaactcccggccaccccttaacggaacggccggaagtttacgcggttatcaggcggcagggcgcgcgataatactgcgggtttccatgcgcacttcagcgatggtgacatcaatcacgtcagtgaccttgtaaaccgtttcgcctttaatttgcacggtcccgttttcctggctacaaaccagttcgtcgcgaacggcatgcaggaacggggcaggaataaaggcaacggcgccattatccaccagacgaacgcgcataccgccgcggctgatgtcaatgatttcagccgggaaacgggtgtcagtccctgccttatcattcaggaagcgcgcgtataaccagtcgccgacatcacgctccgccatacggttgagacggcgacgttctgccatctgcaacgtcgtatcatcctgtgggcgggcaacagattcccctttgatgatcgctttcagcagacgatggttaaccatatcgccgtacttacggatcggggaggtccaggtcgcgtaagcctcaagaccaaggccgaagtgcgggcctggctcggtgctgatttccgcaaaggactggaagcggcgaatacggctgtcaaggaaccctgacggctgtgcgtccagctcgcggcgcagtttgcagaaaccttgcagggtcagcacttcctcaggatcgacgtgtacgtcatgggttttcagcagggcagccagcgcttcggtgttcgccggatcaaacccggtgtgcacgttgtaaatgccaaagcctaatttgtcgcgcagcacgcgggcggcacaaatgttggcggatatcatcgcttcttcaacgatgcggttggcaatacggcgcggctcagcgacaatattcagcacttcacctttttcacccagcacaaaacggtagtccggacgatctttgaagaccagcgcgnnnnnnnnnnnnnnnnnnnnnnnnnnnnnnnnnnnnnnnnnnnnnnnnnnnnnnnnnnnnnnnnnnnnnnnnnnnnnnnnnnnnnnnnnnnnnnnnnnnnnnnnnnnnnnnnnnnnnnnnnnnnnnnnnnnnnnnnnnnnnnnnnnnnnnnnnnnnnnnnnnnnnnnnnnnnnnnnnnnnnnnnnnnnnnnnnnnnnnnnnnnnnnnnnnnnnnnnnnnnnnnnnnnnnnnnnnnnnnnnnnnnnnnnnnnnnnnnnnnnnnnnnnnnnnnnnnnnnnnnnnnnnnnnnnnnnnnnnnnnnnnnnnnnnnnnnnnnnnnnnnnnnnnnnnnnnnnnnnnnnnnnnnnnnnnnnnnnnnnnnnnnnnnnnnnnnnnnnnnnnnnnnnnnnnnnnnnnnnnnnnnnnnnnnnnnnnnnnnnnnnnnnnnnnnnnnnnnnnnnnnnnnnnnnnnnnnnnnnnnnnnnnnnnnnnnnnnnnnnnnnnnnnnnnnnnnnnnnnnnnnnnnnnnnnnnnnnnnnnnnnnnnnnnnnatctcgtccagcttgctgccttcgacaatccatgcggtagggtcggcaatggcgacggtcagatgcagtttgccatcggctgtctcttcggcatacagcgcatcgtccatatcctcggtgctggcgctgtcaatggtgacaaagtccagcgccgtcagatcgcgacgttccagaccttcgtcctgcatttcagtcgccacgccatcaggcgcttctttttcgagattgtggcgcgccagcgtcacccaccatgggacgaaatggtcgtcgccgaaggtaatgtattgggtaagctcggcgtagaaaccgcgatcgccttttaaaggatgacggcgcatctcagcaaccgcccagtcaccctcaacaaaatcatgctcaacgccacgcgcggcgcggcacggaatagcatctttcaggagaggatggtccggcacgacagaaagacgatcgtcttttttatgcactttcccgacaaagcgggtcaggaaaggttcgatcagtgcttccggctcggcagactctcgttccttttcggtatgaataacggccgaaatgcggtcgccatgcatcactttcttcatctgaggaggcggaatgaagtagctcttctgcccgtcaacttcaagaaagccaaagcccttttccgtggcttttacgaccccttctgcacgcggcgtctgggaatgcagttgctgtttaagctgcgctagcagcgggttgtcctgaaacataatgttctattttcgtagccattgagcggctgacagttttacgcgaatctcactgctacagcaagcgctctttaggtaaagagtatggttattcctctttgccgagcgccacgcgcagacggtccagccagccataaaatgcatctcgggtaagcaggttgatggccttctctggcgagagacctgacccggtcaggggcgttaactgggcggcgctaaagcgatccggagaggcgacaagcagcgcacgagcggctgagagcatcgaagacgcggggccttcacttcgcggatggttaagcagaatttcgcccgtcagatcaagcagcatcggctcatgacacagcacaggagtaagcgcttcaagcgccggttccgcctgccagcgtgagagcgcctcaagctgaagcgcactggcatattttagctcaaccgcgggtagcgtggcggtccatctgctgaagctgaccggcagcgtatggggctgaatgtgatgcccgggcagccagcgtaccggatggccaagcaatgcctgaaataccgcgaccactcgcgcctgaaaaccgacaaagccgatgatctggttgataagcacaatgtcatacgttgtgagtccaacctcatcaagctggttttgggctttatcatcgatgacatcgggtgagctggctaactggcgggcatactgggtaatttctgcaaggcgtcgattgctttcccgggaggagtccggccccggaagaggggcgagcagagcagcgtagtggttacagagccgctgaacgccacacgcctgggcaaccgttaatgccgtgctcagcctgtcgtaggcgctgagcgtatgcagacggttcacgggagtatcaagtgggaacaaaagatgacacagggttcgggcaggcgtaagccaaccagcacagcttgcgagaatgtcatcgggcagggctaaatcgagcaaaaaacggtcgtcgacgttagcggcttcgggcaccagcggcagaacgtccgtctgcgaatgattcgactgggtttcatgataccagtggcctttgccggaaaaacggcgttgttccatgggcgttccttgatctcaaaatggcgatcaatatcctggcgtaaggcggatgaggggaaaaatattgttaggtgataacaaatagcagaacggaataacgaggggcggggcggggggaaactctcttccctggcgggaagagagtgacaagcttatttgatttccagctcgttcattgcagcgatgttgaagccgccgtcaacgtgaaccacttcgccggagatacccgcggaaaggtcagagcacaggaatgccgcagagttacccacatcttcgatggtaacggtacgacgaatcggggtaaccgcttcgcagtgtgccagcattttacggaaatctttgataccggaagcggccagggtacggattggacccgcagaaatagcattaacacgcacgccttcaggacccatcgcgttcgccatgtagcgcacgttggcttccagagacgctttcgccagacccataacgttgtagttagggatagcacgttctgcgccgaggtaggacagagtcagcagggctgcgcccgggttcagcattgcgcggcaggattttgccattgcaacgaagctgtaggagctgatgtcgtgggcgattttgaagccatcacgggtaaccgcgttcacgtagtcgccgtccagctggtcgccaggagcgaagccgatggagtgaacaaaaccgtcgaatttcggccatgcttttgccagttcagcaaacatgccatcaatgctttcgtcttgtgcaacgtcacattccagaacaatgctggaacccagctgcgcggcaaattcttcaacacggcctttcagcttgtcgttctggtaggtgaacgccagctcagcgccttcgcgatgcattgcctgtgcgatgccgtatgcgatggacagtttgctggcaacgccagtcaccagaatgcgcttaccggaaagaaaacccatagctttaatccttatattcattgcttattttgccttgtaattcatagcgttacaggcagtatttcaaaatcattcgaaattagctcgaaattatagcccactcacagccccttgtgtcacgatatttctcgctcctgcgccgtgaatgggctcacggaagaggtcgaactgtctcttcatcaggctgtttcgtgtgtatcccagcagtatatcaccgcnnnnnnnnnnnnnnnnnnnnnnnnnnnnnnnnnnnnnnnnnnnnnnnnnnnnnnnnnnnnnnnnnnnnnnnnnnnnnnnnnnnnnnnnnnnnnnnnnnnnnnnnnnnnnnnnnnnnnnnnnnnnnnnnnnnnnnnnnnnnnnnnnnnnnnnnnnnnnnnnnnnnnnnnnnnnnnnnnnnnnnnnnnnnnnnnnnnnnnnnnnnnnnnnnnnnnnnnnnnnnnnnnnnnnnnnnnnnnnnnnnnnnnnnnnnnnnnnnnnnnnnnnnnnnnnnnnnnnnnnnnnnnnnnnnnnnnnnnnnnnnnnnnnnnnnnnnnnnnnnnnnnnnnnnnnnnnnnnnnnnnnnnnnnnnnnnnnnnnnnnnnnnnnnnnnnnnnnnnnnnnnnnnnnnnnnnnnnnnnnnnnnnnnnnnnnnnnnnnnnnnnnnnnnnnnnnnnnnnnnnnnnnnnnnnnnnnnccagcgccttttgcgcaaaatgatccgtttagccctttaaacgctttaaaattgcgcgagggttgataacggctatgccattttgcgtctttatctgtgtgcggtaagaaggaagatgaaaaatattacgttggccgaaaaactgatcatgctgtcaggtgcggtgcttttcgcactaatgatcgcggtgaactccttttgcgtgaatgataatcctggtttcagggtgcctatgaccacctatttgatcgtcatgattgcgctgttctttctggataccattatctttatttttatccagatgctgtatgcctccgaccgaacgcgtttttcattattcattctgagcctggcatttcttagtgggctggtttattttattgagacgatcattgttattcagcttccggagcatgctggttttacccaggcggcaaaaaccaacgatacggcggtattctattttttccggcagctgagctttatcgtattactggcgctggcggtccgtgtggagaaaatcacgatacgatctacgctcagattccgaaataagatcagcatgacgttagcattaatgatgtcactggttatgtttccgatgctggcccattatctcagcagctaccatccggcctggacattaacgattgcagcatacgaagatgaacatcatcatcctgtctgggatatcaggtacgtaaacgttctgatcctgctctggtcggctttactttgttatatgatttcagtgacacgcctggcgtccgggatctggaacagtattattgtggtctgcctttccgccatcgtttacaattttttcctcttactgcttgatacctacaatctgtcgctctggtatatcagccgggcagtagaggtcctcagtaaattatttgtgatttgtaccttaatgttccatgtctttaacctgttgaaaattttcggcgatcgggttgatcgcgatccgcttactcagatctacaaccgtaaatatttttacgaggcacttccgcggatccgctcgctcaggacagaaaagggggccagcatcatgatgctggacatcgacaactttaagtcgattaacgataactggggccatcttgtgggggatcgcgtgattctggcggtcgtggatattatcaaagacagcattcgcgataacgacatctttgcccgactgggaggcgaggaatttggtcttctgctgccggataccgatggtaagcaggctattgccgtcgcggaacgtattcgccagaacgttcaacagcgcaccgggccgggctaccattatgctctccctgtaaaggtcacattaagtatcggcgtgtgctcagccattcagaataacgtcaacagcaatgatattatgcgtgacgtggacgaggcgttgtatgaggctaagcacaacggtaaaaacagaatcgttaccagacaggcggaatgcagctgaggttacaggatggggatgaaaacatcaaaatcgacacgctcatcgctgtacgcattaattttcatcaggtaaataccgtcgcgcaacgtcaggcgtttatttaccatcgccttaacgaagccaatcttgttaaacgcgctgtagctttcccagctaccgctaaagggcattcttgcgtatctcccacgcacaacgcgggattttttatttgtcaccgtgtcgctttgtaaagcgtacgatattaatacctcgaccagatacgatcggcttttgcctaactcggggcggcggggcatcagaataattttatcgatatcatggcggttttctgtcaggagctttttgattttttgagtaatatcatgcaccgaggtatcaaaaagatgatcgtgctcaataatttcatgtgtatagacaaacgtttcattcagatagcagacctctagctcaggcgtttccagttcgcttaataaaaaagagggctgtaagatgtcaaaattccaccctctggcacatctgtactcagagggtgtcagccccatcatttttttaaaggctctggaaaatccctggctgctctggtaatggaataaatacgcaatatccgtcaccggaatcgacgtcattctcagcataatggcggcacggcttaacctccgtcggagaatatactcacctaaagagagccgatacttctctttaaaccatgtttcgatggttcttctgctgtatccaatatctgcaaccaaatcatcaatgtgtaaaatagtaaagttattttcttctacccaggagagaatatagttactgatgctgtctttcatttgtgcgtcagtgatagcttaacggtaaatcagtttgctgcctgttgttaatccgcgggcgtagggatcctggcgataaccttaatttcgaaatcaaaacccgcaagccagttaacgcctattgctgtccagtttgggtaaggagggtggggaaatgccagttttttcgcctccatgatgacggggaactggttttcaggatcggtatgaaacgtcgtgacatcgatcagatcgtcaaaagtacatcctgcggctgccagcgtcgcccgtaaattatcgaacgccagctgcacctgagcggggaagtcgggttcaggtgtgccatcgctgcggctgccaacctgaccggaaacaaataacagatcgccagagcggattgctgctgaatagccatgctcttcatagagggcatgtcgattagccggaaagacgggatcacgtgaatgcatggctgttccttttctgtcagggggattgttgtggttgcgcagtagaagtaacatacgcgatgtatgtcaaaaatgtaagccacatacgtcgcgtatgtcaaattatagttatcgcttaattaaggaagtcccatggctacaaaacgtcgcgctgaaacggcccaggaaaatcgcgagaaaatgattcaggcggcgcgaaaggcatttgctgaaaaaggctatgccgcagcgtcaatggatgaactcacggcaagcgtggggttaacacgcggcgcgctatatcataatttcaacgacaagaagggactactggcggcggtggtcgcgcagatagacagcgaaatggcagcaaacgcaaaagcgattgccgccgccgccgaagatgactgggagcgactgctggcggagggcatcgcctatatcaaaatggcgctcgttccggaagttcagcgtatcgtcctccttgacggcccggctgttctgggcgacccggcgcaatggcccagccagaacagctgccttgagtcgacccgtcagaccatcgaaaaaatgatggagtgcaacgtaatcaaaaagatggatgccagagtcgcagcccatctgctgaatggcgctgctctgaatgcggctctgctgattgccgcgagtgatgaaccgcagaagactctcccgcatgccatagaggtgtttactctgctggcaagcgggttacgcagcggctaacgatctttacgccacgcgtccgccgtcaacgcttcaccaaagtgtccggcaatcaggcgtttcgtcaggtcatggagcggggaggccagtacgtcagcggtactgccgcgctcgacaacttctccctggtgcatcaccagcacctggtcgcttatgtgcttcatcatgcccagatgctgagtcacgtaaatatacgagatcccctgcttttcctgtaactccagcatcaggttaatgagctgcgaacgcatcgacatatccagcgacgccagcgcttcgtcggcgatgatgaccttcgggcgcaggatcagcgcgcgggccagaccgagacgctgtttttggccaggggccagcatgtgcgggtaatagctgacatggtcgggcaggaggcctaccagacgcagggtttcgacaatccgtttgcgacgcgcttccggctccaggtcggtattcaaccgcagcgggaaatccagaatctgggaaatacgctgacgcgggttcagggacgtcgacggatcctgaaaaatcatccggatgcgctgactgcgaaaagagtagtccccaaattccagaggatgatcgtcaatcagtatttcaccgccgctcggctcgaccatacccgcgagcatttttgccagggtcgatttgcccgagccgttttcaccgataatcgccagcgtctgcttttcgcgcagcgtaaagctcaggggtttaacagcctcgacggtctgacggtgaaacaggccggtgcgatagcgaaaggtcttactcaggttacgtacttccagtaaggtttcgaccatttcactctctctccatgttcagcgggaaatgacaggcaaacagatggtttttcggccctgtcaggcgcggtgtttcaatgcatttgcgctgagcatacgggcaacgcggacccagacggcagccaatgggcagcgattccagcagcggtatcgcgccaggcagtgtattcagccggcttttgtgcggcatcgcgctgccaaagtccgggatcgccctgatcagcgcctgcgtgtagggatgatgcggcgtcgtcaccaggtcttcgcttggcgcggtttctaccgtctggccgcaatacattacgtcaattttatccgcccacttgctcagcatttgcaggtcgtggctgatcagcaaaatggtggtgttgttattctggttcagacgcgtgagcaggcggaaaatctgggcctgggtggttggctccatcgcgttcgttggttcgtccgcaatcagcagacgcggctgattcgccagggcgatggcaatcatcactttctggcattcaccgtcggtcagttcgtagggaaaactgcgcatcgcgtctttatggtctttgatcccgacacggtgcaacagctcaatggcacggcgtttacgccagccgaaacgctgccaccagcggcctttataggtccacccggggatgttctgcatcagctgtttcccgacgcgctcggacggatcgagacaggattgcggctcctggaaaatcatcgagacgttatggcccaccagtttacggcgttcgcgcggggagagacgcaacagatcgatgtcgtcgaagcgcatacgatcggcggtcacccgccagttgtccttcgccacgccgcaaatggccttggcgatcagacttttccccgaacccgattcgcccaccagcccgcggatttcgccctctgcaagcgtaatactgatgcgatccacggccttgacccagccttcgcccgttttaatttctatcgtgaggttgcggatatcgagtaacggcattattgcacccccgcattgattgcgcgccggatcccgtcgcccagcaggttaacgagcagcacgctcaccatgatggccgcgcccggcagcatgaccgtccacggcgcaacgtaaatcagctccagcgcatcgccaagcatggcgccccattccggggaggggagctgcgcgcccaggtccaggaagcccagcgctgcgatatccagaatcgccatcgacagggcgcgggtgatctccgtcaccagcccggcggcaatgttaggcagcacggcaaaccacaaaatattaaacgtggtggcgccatccagacgggcggcgacgacatactctttctccagctcgtcgtgaaccaggctgtaaaccgagcgcaccatgcgcggcagaatggccagccagacggcgaacatcgcatgggtgaggtgcggccccgcgaaggccacgacgataatcgccagcagcagcgaaggaatagagagcagggtatcaagaatatggttaagcacagccgaccgcagcccgtgggttgagccggcaaaaatgcccagcgccaggccgcagatcgcggcagccagggtgaccacgaacgcgccgcccaccgtaggtgcggcgccgctcagcaaacgacttagcacgtcgcgtccgagatcgtcagtccccaggaagaacgaaacctccccgtagcgcgaccacgacggcggtaaaagctgatagccaaggaactgctgatcgatgccatacggtgcaaaccacgaacccaaaacgcacagcaacacgaggccaatgcagccgtaaaagccgatcatcgccgtggtgtcgccgtaaaaattacgccacacggtgcgtagcgcaccgggcgtgcgcttttcgctgtagacgttatcgtaaggcataccattccttatgcttcaatgggttggccatggcacccaaaatatcggaaacaacgttaacaataatgaccagggagccaatcaccatcacgccggcagagatcgccgcgtaatcctgctggcgaatggcgttgatcatccagcgcccaaggcccggccagctgaaaaccatctcggtgatcatcgccagcgtcagcatggttgagaattgcagcccaagacgtgggataacgggtggcaacgcattgtgcagcacatggcgacgtagaatcgtcaggcgagacagtccgcgcgtggcggcggccttcacatagttttgatcgaagacttcaatagtgctgatgcgcatcaggcggatcacttcggtcgtcggcgcgacggccagcgtaagcaccggcagcaccatgtggcgcagcgcactcacgatcatttcgtcgcgccagactgaatcagaaagccaggcgtcaacgatggcgaagccgctcaccgtttgcacgttatacagcaggtcaaaacggccagacaccggcagccagcctaacgtcagtgagaagaagagggtaagcagcagcgccagccagaaaacagggatggaaaagccaattaaggcaagcgcgctgatgaatttatcctgccacttattacgataaatacccgccagcatccccaccgggatccccaccatgagggcaaagccaaaggcgagtatacacagctccatggtggccgggaaaaccactttcagctgttcggagatgagctgtccgttgatgctggacacgccaaaatcccagtgcagcaggccattaaaccagaacagccaggcgtcccagagagatgagccctgaagcggggcgtgcggcgtaaagtagctcaggctaaagccgacaaaggtcaggaagaacaagggtcaccagcagtaacagcagccgacgcaaggtaaatataatcatggtttcttcacctcttgttctttnnnnnnnnnnnnnnnnnnnnnnnnnnnnnnnnnnnnnnnnnnnnnnnnnnnnnnnnnnnnnnnnnnnnnnnnnnnnnnnnnnnnnnnnnnnnnnnnnnnnnnnnnnnnnnnnnnnnnnnnnnnnnnnnnnnnnnnnnnnnnnnnnnnnnnnnnnnnnnnnnnnnnnnnnnnnnnnnnnnnnnnnnnnnnnnnnnnnnnnnnnnnnnnnnnnnnnnnnnnnnnnnnnnnnnnnnnnnnnnnacgggctgagtaccagccctttaatatcgtaacggtaggcctggaggcgcagggaagaggcaagcggcaacacgggaagttctctggccagaatattttgcgcttcatcgtaggcctcaatgcgtgaggcaagctgttgagacgccagcgctttttgcagcacggcatcaaattcccggttacaccagtgggcgtagttggtctgggagttgattgccgcacagctcagcagcggacggaaaaagctgtccgggtcgttactgtcggtggaccagccagccagcgttaagtcgtgattcatgtccatcagacgcgcctcctggaaacggccttcgacaggcacgatgatcaccttaacgcccacctgcgccatatcagcctgcaacagctccgccgttttcagcgggctggggttccacgcctgagagctggtgggcacccacagctgtagcgtcaggttttctgcccccagcgctttaagctgttcgcgcgctttcgccggattatattccgtaatcttcgcctcgccgtcataggcccaggaggcgcgcggaagaatagaggcggcggtttccgcggtaccgtagtaaatcgactgcatcagacgctggttgttgatcgctaacgccagcgcatggcgcacggccggattattcagcggcggcttatcggtgttaaacgccagataagcgatgttcatgcccgggcgcagggtcaggcgcaggcgtgggtcgtcgcgcaaaatggtcaactggctggccgcaggccaggcaagcacgtcgcactcgccggtcagcagtttggagagtcggcctgttccacctgaacccagatcaacaataacctgcggcatcagcggcttgccgcgccagaaacgatcgtggcgttgcaggcgaatgtattgtccggcgcggtactctgctaactggaacggaccggtgcctacaggctcacgatcgagacgttcctgacgatcctttttcgtcagctgatccgcgtattcggctgacatgaccgaggcgtagtgcgtcgccagatgccagaggaaggaggcatccgggcgattcagacgaaactcaaccgtacggttatccagtttgcgaacgcttttgaccgagtccgcgaattgcagactgtcgaaataggggaagttcccgccattaacgttatgccacggatgattgcggttgaatatgcgctggaaggtgaaaaccacgtcatccgcgttgagcttacgggttggggtaaaccacggggtgtgctgaaaagcgacgtcatcgcgtaaacggaagcggtatgtggcgccgttatcaagcacttcccaactttcagcaagctccggaaccagccgataggtataaggatcgacgtcgagcaggcgatcgtagagctgtgcggccagcgtatcgacaatcaggccgctccccgctttttgcggattaaaaatatcaacttgaccgctgacgcagtagacgaaaccactatcacggatatcaggaggcacagcgcgatcgggcgcagcaaaggccagattgctgaacaaaccgagtgcaaacagggacgataaaaccaggcgcatagtttttaaggtttttagattcgatctgcaaagtgtatcgcacttacgcctgcttcgtaaaaatgtctgggggtaagtgctgataatgtcagcgcatttgatgttttttgagcaatgcccttaactgatggtaggtcagacccagcagttcagctgcccgtttctggttatatttcgcctctttcaggctctgctcaagcagctgttgctcctgctgatgctggaactggcgtaaatcgagcggcaacgccggagcctgctggcgcgtcgccggagcagggagctgtttatcctcgcgccgaaaaggatcgagaataatgttgtccagttcggtctcgctgctgccatgccggtaaacggaccgttccaccacgtttttcagttcacgaatattgcccggccagtggtaaccgagcagggtcccggtggcccgttcgctgaagcccggaaagagaggcagacccagttcccggcacatctgaatggcaaactgatcggccagcagcatgatatcgctgcgccgctcccgcagcggcggcagctgaacgacatcgaaagccagcctgtccagcaggtcggcgcggaatttgtcctcagccaccatcgcgggcaggtcggcgttggtggcgcacaccaggcgaacgttgacctggagcggctgactgccgccaacgcgttccagttcaccgtactcaatgacgcgcagcagcttttcctgcaccagcatcggcgcggtcgccagctcgtcgagaaagagcgttccgccatcggcgcgctcaaagcgtccgggatggcgtttttgtgcgccggtgaaggcgccagcttcatgaccaaacagctcggtgtcgagcaggttttcattcagcgccgcgcagttaagggaaataaaagggccgtcccagcggccagacagaaagtgcaggcggttagcgataagttctttacccgttccgcgctcaccgataatcagcaccggtttattcagtggcgcgaggcgcgatacctgttcaagcacttccaggaagctgttggcctcgccaagcaaattatctttatattcagccatgatgaaattaaccactccttagtgatattcaccaggtgagaatagccgctggctggataaatatcaatcacactcagtaaaatcaataagataaaaagttggcatgggatttgtattaactactcagcagggcatcgcccgataacagaactatgaggattgaattatgggtattttttctcgttttgccgacatcgtgaacgccaacatcaactcgctgctggagaaagcggaagatccgcagaagctggtgcgcctgatgattcaggagatggaagacacgctggttgaagtacgctccacctccgcccgcgcgctggcagagaaaaagcagttaacgcgtcgtatcgagcaggcaactgcccagcttaacgaatggcaggaaaaagcggaactggcgctgcgtaaagataaagaagatctggctcgcgctgcgctgattgagaagcagaagctgaccgacatggttgccacgctggaacacgaagtgacgctggtggatgatactctggcgcgtatgaagaaagagattggtgagcttgaaaacaaactcagcgaaacccgtgcacgtcaacaggcgctggcgctgcgccaccaggctgcaagctcgtcccgcgacgtgcgtcgccagctggacagcggcaagctggatgaagcgatggcccgtttcgaatcgtttgaacgtcgtatcgaccacatggaagctgaagccgagagccacagcatcggtaaacagaaaaccctcgatcagcagtttgctgacctgaaagccgatgatgaaattagcgagcaactggctgcgctgaaagccaaaatgaaacaagacaaccaataataattcctgcggcacctgagcgtgccgcatcgtaagacaaggagtacatatgagcgcgctttttctggctatacccctgaccattttcgtgctgtttgttctgcccatctggttatggctgcactacagcaaccgctcttcacgcggtgagctgtcgcagagtgaacaacagcggctggcgcagctctctgccgaggcaaataaaatgcgcgaacgtattcaggcgctggaagcgatcctggacgcggaacacccgaactggagggaacggtaatggctggactgaatctgaataaaaaactgtggcggatcccacagcagggcatggttcggggtgtttgcgccgggctggcgcactatctggatgttccggtaaaactggtgcgtgtggtcaccgtattgtcgattttcttcggcctggcctttattacactggtggcatacatcatcctgtcgtttgtactcgatcctatgccggaaggtgagctggatgcggagaacacgccaaccagcagcgatctcctgaacgcggtggatgaacagctgagcgcaggggagaagcgattgcgcgagatggaacgttatgtcacctccgatacctttacgctgagaagtcgttttcgtcagctataagagagaacttacatgaaacaaaactggcaacaggccggtcagaaggtaaaacccggcctgaaaatcgcaggtaaactggttctgatgacggcgttacgttatggcccggccggtgtggcgggttgggcgatcaagtctgttgcccgcaagccggtcagaatgatgctggcggtcgctctggagccgctgttacagaagctggcaaaacgcgtttcccggcgctacctgtcacgctagttcctcccgcataagccctttctcgcccagagaaggggcatgactttcccttctgcgtttcttctgcttttctgctttctttgcggcagctcacaataatgcgttgcgctgcgctgagattgctgctttctgcccccgggtccgttgacagatatttttcatgggagtagattgccactccgtgggaccgctaccatggaaaataatgtgaacgcaaaaattaaaaaacttatcaatcatatttacggtgaatcattttcagatgcacaccttaacgtgttattaactaagcttgaaaaggtggcggttaatattacggaaaagcgtaagtcaggctgggatgaaaaagacgttgtgctgattacctatgccgatcagttctccgcgaaaggggaaaaagcgttgccggtatttacccggttctataatgaatggctttctcgcacgttttctcatgtccatctgttaccgttttatccgtggtcgtcggatgatggattttccgttattgattatcacgaagttgcacctgaaaccggaacctggcgagatgtcgcggaattaaaacagtctgccagcttaatgtttgactttgtttgcaaccatatgtcagcgaaaagcgaatggtttgctaattatctggcgcagaagccgggctacaaagatttnnnnnnnnnnnnnnnnnnnnnnnnnnnnnnnnnnnnnnnnnnnnnnnnnnnnnnnnnnnnnnnnnnnnnnnnnnnnnnnnnnnnnnnnnnnnnnnnnnnnnnnnnnnnnnnnnnnnnnnnnnnnnnnnnnnnnnnnnnnnnnnnnnnnnnnnnnnnnnnnnnnnnnnnnnnnnnnnnnnnnnnnnnnnnnnnnnnnnnnnnnnnnnnnnnnnnnnnnnnnnnnnnnnnnnnnnnnnnnnnnnnnnnnnnnnnnnnnnnnnnnnnnnnnnnnnnnnnnnnnnnnnnnnnnnnnnnnnnnnnnnnnnnnnnnnnnnnnnnnnnnnnnnnnnnnnnnnnnnnnnnnnnnnnnnnnnnnnnnnnnnnnnnnnnnnnnnnnnnnnnnnnnnnnnnnnnnnnnnnnnnnnnnnnnnnnnnnnnnnnnnnnnnnnnnnnnnnnnnnnnnnnnnnnnnnnnnnnnnnnnnnnnnnnnnnnnnnnnnnnnnnnnnnnnnnnnnnnnnnnnnnnnnnnnnnnnnnnnnnnntatctggcgcagaagccgggctacaaagatttctttatttctgtcgatcccgaaaccgatttatcggcggtgacgcgtccccgcgcattaccgctgctgacgccgttcacgcttaatgatggcagcgttcgtcatctgtggaccacattcagcgatgaccagattgatctcaatttcgcctcgccgcaggtgttgattgccatggttgatgttctgctccattacctcatggaaggggcgcgttatatccgtctggatgctgtcgggtttatgtggaagatcccgggaaccacctgtatccatctggaacaaacccattgccttatccagctgttccgcgccattacggacgccgtggcgcctggaacggtgatcatcactgagacaaatgttccccacaaagacaatatctcttacttcggtgatggtgaaaatgaagcccagatggtctatcagttttccttaccaccgctggtgctgcacgccgttcatcgtcaggatgtcaaagccctgtgccggtgggcgggctcgctggcgctgccttcaacttacaccacctggtttaatttcctggcttcacatgatggtatcggattgaacccgttacgcggcatccttccggaatcagagatcctttcgctggtcgaaaagcttcagcaggaaggcgcgctggtcaactggaaaaataatcctgacggaacgcgaagcccctatgaaattaatgtcacctatcttgatgcgttgagtttgcgagacagctcagatgatgagcgcattgcgcggttcatcctggcgcatgctgtgttgttaagttttcctggcgtaccggctgtatatattcaaagcattcttggttcgcgtaacgattatgaaggtgtcgagcgtctcggatataatcgcgcgataaacaggaagaaatacaccgcaggtcaggttgatcgggagcttaataataataagagtattcgttatcaaatttattctcgtttgagtgagcttattgctattcgtcgcggcgagcgtgcgttccatccggatagtcaggctatttttgacgcaatcggtgaacatattcttaaaattgttcgtgttgctgaaaatggtgagcgaatgacagcattatttaattttagcaataaaatgcagaccgtttatggacaaacgctctttggtagggaattactctcaggacaagatattagcggtacggaactgaccctcaatccatggcaggtaatgtggattaaagaaaactaaaaaggaccctaaaatgaaaatgcccaaaattgtgctgttatcagcactggtttcgtgcgccctgttatcaggctgtaaggacgataaagcatctcaggtcaccattgagtttatgcactcgtcggtagaacaggagcgtcaggcagttattacgaaactgatcgaaaaattcgagaaagaaaacccgactattacggtgaaacaggtccccgttgaggaagatgcctataacaccaaggtcattacgttggcccgtaccggcgcgctgccggaagtgattgaagtcagccatgactacgccaaagtcatggataaagagcaactgctggaccgtgacgcgatcggcaacgcgattaaagccgtcggtgaagataccttttatgacggcattttacgcgtggttcgcactgaagacggcaaggcatggacgggggtgccggttagcgcctggctgtccggcgtctggtatcacaaagatgcgctcgcggcagcgggaatcgaagaaccgcacaactgggagcaactgctgaaagccagtcaggcgctcaacgatccggcgaaaaaacattacggtatcgcgcttccaaccgcagaaagcgtcatgacggagcaggccttctcgcagtttgcgttgtcaggcggagccaacgtctttgatgcaaacggcaacgtgaaaatcgatacccctgaaatgtcgaaagcgctggcgttttatcgggcactggccgcgaacaccatgccgggctcgaatgatgtcatggagatcaaagacgccttcatgaacggctctgcgcctatggccgtttactccacctatatcctgcccgcggtctacaaagatggcaatccggccaacctggggttcgtggtcccgacggaaaaatcatcagccgtgtacggcatgatcacctcgttgacgatcacgaccggccagaccgaagaggaaacgcaggcggcagaaaagtttgtgacctggatggagcaggctcaaaacgcgtctgactgggtgatgatgtcccctggcgcggcgctgccggtgaacaaactcgtggtgggcactgaaagctggaaaaacaacgacgtgatcaaagcctttggccaactgccttacgagctgattgcgcagttcccgaacgtccaggtatttggcgccgtgggcgataaaaactttacccgcatgggagacgttaccggctccggcattatcagttccatggtgcataacgtgacggtgggacaaaaagatctcagtgcgacgttaagcaacagccagaagaaactgactgacctgatatcacaacgataggagcgctttgcgaagggaattatgaagacgttgttttctggtcgttcagatatgcctttcgccatgctgctgttggcccccagcctgattttgctggggggcctggtggcctggccaatgatttccaacattgaaatcagttttttacgtttaccgctgaacccgcgtattgatgcggtgttcgtcggcctggataactacattcgcattctgggcgatgctgcgttctggcactccctgtggatgacgttctggtatacggcgctggtcgtgctcggcagcaccgggctgggactggccgtagcgatcttctttaaccgtgaattccgcatgcggaaaacggcacgttcactggtgattttgtcctacgtgacgccgtctatttcactggtatttgcctggaaatacatgttcaacaacggctacgggattgtgaactatctgggcgttgatctgctgcatctctacgatcaggcgccgctatggttcgataatcctggcagcagttttgtgctggttgtcctgttcgccatctggcgttacttcccgtacgcctttatctcgttcctcgcgattttgcagaccattgataaatcattgtacgaagcggcagagatggacggagcaaatgcctggcagcgttttcgtatcgtgacgttgcccgccatcatgccggtgctggccacggtggtcacgctgcgaaccatctggatgttctacatgtttgcggatgtttatctgctcaccaccaaggtcgacattctgggcgtatatctctacaaaaccgcctttgcgttcaatgacctgggtaaagcagccgccatttccgttgtgctgtttgtgatcattttcgctgtcattctgctgaccagaaaaagggtaaacctcaatggcaacaaataaacgcgttctgggccgtatcggtttttatctgggactggcgctatttctgattatcacgctgtttccattttttgtgatgttgatgacgtcgttcaaaagcgcgaaagaggcgatctcgctgcacccgaccattctgccgcaggagtggacgctacagcactacatcgacatctttaacccgctgattttcccgtttgtggattactttcgtaacagcatggtggtgtcgctgacctcctcggtcattgcggtgtttctcggcacgctgggcgcgtatgcgttatccaaactgcgctttaaagggcgcacgacgatcaatgcgagcttctacaccgtctatatgttctccgggatcctgctggtggtgccgctgttcaaaatcatcaccgcgctcggcatttatgacaccgaactggcgctgatcatcaccatggtgacgcagacattgcctaccgcggtctttatgctgcgcagctatttcgacaccatcccggacgaaatcgaagaagccgcgatgatggacggcctgaaccgcctgcaaatcattttccgcatcaccgtgccgctggcgatctcgggtctggtgtcggtctttgtctactgcttcatggtggcgtggaatgactatctgttcgcctccattttcctgtccagcgccagcaacttcacgttgccggtcgggctgaacacgctcttcagtacgccagattacatctggggtcgcatgatggcggcatcgctggtcacggcacttccggtcgtcattatgtatgccctgtctgaacgtttcattaaaagtggtttgaccgccggcggcgtgaagggctgaggcggccgattttaacaaggagtcagtcatgaaaaaattagttgcgacagcgcctcgtgtagcggcgctggtggaatacgaagatcgtcctgttgcagcacatgaggtgaagattcgtgcccgttatggcgccccgaaacacggcactgaagtcgtggatttccgcgcggcaagcccgttcatcgatgaagagttcaacgcggagtggcagatgtttaccccgcgtgaagaaggagcagcgcgcggcatcgaatttggtaaattccagctggggaacatgatcgtcggcgacatcatcgaatgtggtgcggacgtgaccgaataccagatcggcgacagcgtctgctgctacggcccgttgcaggaaacggtcattgttaacgcggtgaacaactataagctgcgcaaaatgccgcagggtgcatcctggaaaaatgccgtttgttacgatccggcgcagttcgccatgagcggcgtgcgtgatgctaacgtccgcgtaggggatttcgtcgtagttgtggggctgggcgcgattggccagattgcaattcagctggcgaaaaaagccggcgcgtcagtggttattggtgtcgatcctatcgaacatcgctgtgagatcgcccgccgtcacggtgcagaccactgcctgaacccaatcggtaccgatgtcggtctggaaattaagaaactgaccggcaagcagggcgcggatgtgatcatcgaaaccagcggatttgcagatgcgctgcaatctgcgctgcgcggtctcgcctacggaggaacaatctcctacgtggccttcgccaagccgtttgcggcgggcttcaaccttggtcgcgaggcacacttcaacaacgccaaaattgtcttctcccgcgcatgcagtgaacccaacccggattatccgcgctggagccgcaagcgtattgaagagacctgctgggaattgctgatgaacggttatctcaattgcgaagatctgatcgacccggtcgtcaccttcaccaccagcccggaaagctatatgaagtatgtcgatcagcacccggaactcagtatcaaaatgggcgtcactttttaagctaaggacagcaaatcatgaaaatcgcaacacaaaaccaggcctttttcccgaccgctatcatggaaaaattcgaatacatcaaagcgatgggatttgatggctacgaaattgatggccggctgctggtggaaaacctcgacgaagtaaaagcggctatcaaagccaccggcctgccggtcacgacggcctgtggcggatacgatggctggatcggggattttatcgaagaacgccgcctgaacggtctacagcagattgaacgcattctggaagcgctggcagaagtgggcggcaaggggattatcgttccggctgcctgggggatgtttaccttccgtctgccgccaatgacttcgcctcgtagcctggacggcgatcgcaaagcggtcagcgcttccctgcgctggctggatgcggttgcagcgcgcaccggtactaccgtctacctggagccgctgaaccgctatcaggatcatatgatcaacacgctggccgacgcgcgtcattatatcgaagagaacggcctgaagcacgtgcagatcatcggtgatttctaccacatgaatattgaagaagactccctgacggaagcgctgcatcacaaccgcgacctgctgggtcatgtgcacattgctgataaccaccgctatcagccgggcagcggcagcctcgatttcgccagcctgttcgatcagctgcgtgccgataactatcagggttatgtcgtgtacgagtgccgggtgcgtgccgacgatccggctcaggcctataaggactctctcacttacttgcgtgaatgctaaggatgacgagcgtgatgagtgcttctacacctttgcctctgcgcgtcgccatcattggcgccgggcaggttgcagacaaagtgcatgcctcgtattacgccacgcgcagtgatgttcaaatggtggctgtcatggacagccgccttgagcaggcacaggcgttcgcggaacgttatgctattccatcggcatggcaggacgctcacgagatgttgcaggaagtaaaaccggatgtggtgagcgtctgttcgcctaaccggttccattttgaacatgtgatggcggctctcgaagcaggctgtcatgtgatgtgtgaaaagccgccggcgatgacgccgcaccaggcagatgagatgcgtttggcggcgcgcaaggctggaaaagtcctcgcgtacgattttcaccatcgctttgccctggatacccagctcctgcgcgatgcggttatgaacggaacgctcggtgaaatttacttcacctccgcgcaggcgctgcgtcgttgcggtgtgccggggtggggcgtgttcaccaataaatcgcttcagggcggcgggccgctgatcgatatcggcattcatatgctggatgccgcgatgtatgtgctgggcttcccggccgtgaagcgggtaaccgcgcacagcttccagagactggggaaccggaaacacaccggccagtttggcgaatgggatcctgcgcagtttaccgtggaagatgccctgtttggcacgattgagttctgcaacggtggcattctgcgtctggacacctcttttgcgcttaatatccgcgagcagtcgatcatgaacgtctctttctgcggtgagaaggcgggtgcaacgctgttcccggcacacatttataacgacgaagccggtgttttgcagacgctgacccagcgtgaagaagctgacgatcggagacatctgcgcagtatggacgcgtttgttcgccacgtaatgggcgagccggtcatgattgccgatgcggagcaggggctggtgatccagcaattagtcgcggcgttatatgaagccgcggaaacaggggaaagcgtgacgttatgctgaaccagtctgtactaaccgatccgggcttttgcccgcatagcctgaataagtacgcgtccattatggcctgcggcaatggctacatgggcatgcgcgccacgcatgaagaagattacacccagcagaccagaggcatgtaccttgcggggctgtatcatcgcgcgggacgcaacgaaaccactgagctgatcaatctgccggatgtcaccgggattgaagttgagctggacggcgtcaatttcacgctcctttcaggcgaaattcttgagtggcaacgcgagctggcctttgctaacggcgaactgcatcgtaacgttgtctggcgttcgccggacggaaaacgctatcgcctggaaagccgtcgttttgtttcgctggaccagttgcccttagtggcaatgcagctctcgatcacaccgcttgacggcgccgctcaggccgtgctgaaaaccggcatagatgcgacacaaacgaacagcggcaggcagcacctggatgaaatctcggtcagggtctttgaccagcactacatgcagggtgtgtatgaaacgcaggaccgggcgtctgaagttgttgtttcggcgttttgtcagctctccgctaagagcgacagctgtttcaccgccaaaaatcggcgccttagcgttcatcattctctgactatctcgcaaggtgacactgtcacgcttgaaaaaatcgtctggctgacgcatcgctgcgataaatcgctctcgcaggagtctttcgcccgcaacgcgctggccgatctcaaagtctgcgccgcaagaggctacgatgcgttgcttgaaagctcagcgtacgcctggaaagcggtatggcgtgacgctcgggtggaagtgacgtgtgcagaacagcaggatcagctggcgctggattacgccgtctggcatctgacgacaatgacgcctgctcatgatgagcgaagcagtattgcggcgaaagggctgacgggtgaggggtataagggacacgtcttctgggataccgaaattttcctgctgccgttccatctgtttacccatccacagattgcccgcagcctgctgcgctatcgctggttgaatctttcgggtgcgcgcgaaaaagcacggcgtaacggttggccgggcgcgttgttcccgtgggaaagcgccgccagcggacaggaagagacgccagaattcgcggccattaacatccgcaccggggttcgccagaaggttgcttccgcactcgctgaacatcacatcgtggcagatattgcctgggccgtagtcgcttactggcaggcaacacacgacgatgtctttatgcgcaatgagggcctgacgctgctgatggaaaccgcttcgttctggatgggacgcgcgacggaaattaatggtcgtcttgagatccatgacgtgatcggaccggatgaatacaccgagcatgtcaacaacaatgcctacaccaactatctggcctggcacaacgttgcctgcgcgcgtcagtttatggcgatgtttgggcgtgaagatgcgcgttttacggagaatgccgggaagttcctggcgcgcctgtggctgccagaggccgatgcagacggtgtgatcccgcaggacgataccttcatggcgaaacctgccatcgatctgagccgctataaagccaaagcgggtaagcaaaccattctgcttgattactctcgcgcggaagtgaacgagatgcagatcctgaagcaggccgacgtggtgatgcttaactacctgctgccggaacggtttacgccgcagcaatgtgccgccaatctggcgttctacgagccacgcacgatccatgattcatccctgagtaaagccattcacggcattgtgctcgcacgctgcggtgacaccgacggggcgtatgccttctggcgtgatgggattgccatcgacctgggggacgacccgcacagcagtgatgacggtattcatgccgccgccaccggtgcgatctggttgggcgccattcagggttttgctggcctgcacattagcgaaggggagctgcatcttgcgccgaagctgcctgctcactggcagaaactcgccttcccgctgcggtggcggaacgcaacaatgcacgttacctgtgaagatgaccagttaaccattgaaactaccgcacctgtcacgttgacgctgtggggtaaaacgctgcacgtatcagggcgaaaggtctgtgcgcgtaaggactttcttgcatctgttaatgggaccgctaccacggaggggggccatgacgcttaacgctgttgtattcgatctggacggggtgatcaccgataccgcgcatcttcactttctggcctggcgcgccgtggcggaggagattggtatcaccttcgacgaagtatttaacgaacagctgaagggaataagccgtatggactccctacagcgcattctgatacatggcgggaaagaggggatgttcagtgacgagcagcgcctggcgctggcgacgaaaaaaaacgcgctttacgtccagtcgctggcatcactgacgcaggattcgctgctgccgggtattcgcgacgtgctggcggatattcgcgccgcgaaggtcaaaattggcctggcatccgtatcgcttaatgcccctgggattttgcacgcgttgggcattcatcaggctttcgatttttgcgccgatgcttcgcgtattagccactcaaagccggacccggaaatcttccttgcggcctgtaagggactgaacgtacgtcctgaagaggccattggtatcgaagatgccgccgcaggggtagatgcgatcaacgccgcaggaatgctgtcggtcgggattgggcctggcctgaaccatgcgggattacaacttcattcaacgcaggaactgacctgggaacgcctgacggcgttctgggcatcccgggcgtattgataaggaattaataatggctcaactgtctctgaaacacattcagaaaatctatgataaccaggtccacgtggttaaggatttcaacctcgaaatcgaagacaaagaatttattgtcttcgtcggtccatcgggctgtgggaaatccacgacgctgcgaatgattgccggccttgaggagatcagcgcgggtgaactgattattgacggggtttgcatgaatgatgttcccgccaagtcccgtgatatcgcgatggtcttccagaactatgcgctctatccgcatatgactgtctacgacaacatggcgtttggcctgaaaatgcaaaaaattgcgccctccgtcattgaagaacgcgttacctgggcggcacagatcctgggcttgcgcgactatctccagcgtaaacctggcgcgttgtccggcggtcagcgccagcgcgtggcgttaggcagggcgatagtgcgcgaagcgggggtcttcctgatggatgagcctttatccaacctcgatgccaaacttcgtgtgcagatgcgcgctgaaatcagcaagctgcaccagaagcttaataccaccatgatttacgtgacgcacgatcagacggaagccatgacgatggcgacccgcatcgtgattttaaaggacggcatcattcagcaggtgggcgcgccgaagcaggtctacaacgagccggcgaatatgttcgttgcagggtttattggttcgcctgcgatgaacttcattcgtggcgcgatcgacgaccgctactttgtgacggaaacgctgcgcctggagatcccggaggacaagctggccgtactgaatgcgcaaggttaccagcgtaaagcggttgtctttgggatccgtccggaagacattctcaccgcacagcgaagcggtgaaaacatcacggcgaagatcagcgttgctgagctgaccggggctgaatttatgctttatgccaccgtgggtgggcatgaactggttgtccgtgcgggagcggcggatgattacgttgccggagagaatatcggcatccagttcgatatgaataagtgccatttcttcgatgctgatactgaaacagctattagataagaaaggtgttcgccggaaatgaaagtttccggttttttgtgtgttaattataaaggaatattttaatgagtactctactaagaagtgctgcgctcgttctgtgcgcaggggtgagctgcgcgcaagcaacagaatcagccaaacagtgggaatttaatattggcgccatgtatgaaattgaaaacgtcgaaggtcaggctgacgataaagatggattatatgaaccctccgtgtggtttaatgccacatgggatgcctggaccatttcgctggctatgtatcaggaagggccggtcgattacagtagcatgacgcgcggcacctatttcgatcgtcctgaagtagaattacgctatcgttttatcggcaccgatgattttacgttcggcctgaccggtggcttccgtaattatggctatcactttaaggatgagcatggtgctaaagacggtagtgctaatatgcagcgctataaagttcagcctgactgggatattaaactaaccgacgactggcgttttggcggctggtttgccatgtatcagtttgccaacgatctggaaaaaaccggctattctgacagccgcgtcgagaccgaaaccggttttacctggacaattaacgaaacggtctcggcaaaagttaattactatttagagcgcggttttaatatggacggctcacgaaataacggtgaattctccactcaggaaattcgcgcctatctgccgatttcattgggtcagacgacgctaacgccttatacccgtctgggactcgatcgctggtcaaactgggactggcaagacgatcctgagcgtgaaggacatgatttcaaccgtttgggtatgctgtacgcctatgattttaacaatggtttatccatgacgctggaatatgcctacgaatgggaaaaccatgacgaaggggaaagtgaccgcttccactatgccggtatcggcgtgaattacgcgttttgataacacttcaccaggggcgtttgcccctggtttttagcgtaatgaagccgcatctgaaaaatgcgtttcaaccaatatcttatgcggggcaggtttacccgctatgcacctgaacaacacatcgcagctctcttcgcccagctttctggtggggatatcaaagccgccaggcgcaggggttaaaatgagagatagcattgggtcgctgtatcctgccattgcgacctgttccgggatcgtcaggtttagcgcatccgcggcacgataaagactcagcaatttcatactgtctgtcgcaaaaaccgcatcgggcgggttgtctgaagagagtagctgacaggccgcctgaagcgcgctttcatgggtgtatccgccatcaataacccagtccgggttaattgcaataccctgcttctcaaggctcgatttatagcccgccaggcgatcgatagaaacgtgataatcgagcggggcatgcaggcaggcaattttagtgcgaccatgattgataaatgagtcggttaatatggcgctgtcacggaaattatccgtgtcgacagaatagatattctggtaattaccttccactttaccaataacaaccacgggcacgccatattcgtccagcgtcgcgaaaaaagactcgttcgccggcgagcttagcatgatgatccccttgatcatcttctgctttattttacccacgcatttttgcagatcatcttcgctgcttttggacgtttgtaaaataacatcaaaaccctcttcttctnnnnnnnnnnnnnnnnnnnnnnnnnnnnnnnnnnnnnnnnnnnnnnnnnnnnnnnnnnnnnnnnnnnnnnnnnnnnnnnnnnnnnnnnnnnnnnnnnnnnnnnnnnnnnnnnnnnnnnnnnnnnnnnnnnnnnnnnnnnnnnnnnnnnnnnnnnnnnnnnnnnnnnnnnnnnnnnnnnnnnnnnnnnnnnnnnnnnnnnnnnnnnnnnnnnnnnnnnnnnnnnnnnnnnnnnnnnnnnnnnnnnnnnnnnnnnnnnnnnnnnnnnnnnnnnnnnnnnnnnnnnnnnnnnnnnnnnnnnnnnnnnnnnnnnnnnnnnnnnnnnnnnnnnnnnnnnnnnnnnnnnnnnnnnnnnnnnnnnnnnnnnnnnnnnnnnnnnnnnnnnnnnnnnnnnnnnnnnnnnnnnnnnnnnnnnnnnnnnnnnnnnnnnnnnnnnnnnnnnnnnnnnnnnnnnnnnnnnnnnnnnnnnnnnnnnnnnnnnnnnnnnnnnnnnnnnnnnnnnnnnnnnnnnnnnnnnnnnnnnnnnnnnnnnnnnnnnnnnnnnnnnnnnnnnnnnnnnnnnnnnnnnnnnnnnnnnnnnnnnnnnnnnttggcataccccgtttcacctatgatgaaggtctggcgcagttatacggggagcctcccgcctggcccaccccgacgcgtggcgtgagcgaaatccgtcctgcgcttcgtttccgctcgaatgaatccctgatgcgtcacttcaaagaaacgtccacgctctatctcgaaattgtggattacccaggagaatggctgctcgatttaccgatgctggcgcaggattacctgagctggtcccgacagatgaccggtctgttgcaggggcagcgggcagagtggtcgaccaaatggcgccagctttgcgaaggactggatccgctggcaccggcggatgaaaaccgtctggccgtcatagccgaagcctggacggattacctgcatcagtgcaagcaggaggggttgcattttattcagccgggccgctttgttctgccgggtgatttagccggtgctcccgcgctacagtttttcccgtggccggacgttgacagcatcggtgaatcgaaactggcgcaggcggacaagaccaccaacgccggtatgctccgcgagcgatacaattattactgtgagaaggtggttaagggcttttataaaaatcactttttacgctttgaccgccagatcgtgctggtggactgcctgcaaccgctcaacagcgggccgcaggcgttcaatgatatgcggctggcgctgacgcagctgatgcaaagctttcattatggccagcgtacgctgtttcgccgtttgttctcgccggtcatcgacaagctgctgtttgccgccacaaaagctgaccatgtgacggtcgatcagcacgccaacatggtatccctgctgcaacagctggtgcaggatgcctggcagaatgcggccttcgaagggatcagtatggattgtctggggctggcgtccgtacaggctacgcagagtgggttgattgacctgaatggcgagaaaattccggccctgcggggcaaccgtctcagcgacggtgcgccgctcacggtctatccgggggaagttccggcgcgtctgccgggccaggctttctggcaaagccagggttttcagttcgaagccttccgtccgcagagtatgaacgttgaccagccattgccgcatatccgtctggatgccgcgctggagtttttaattggagataaattgcgatgacggaaccgttaaaaccacgcattgattttaccggccagcttgagcagtccccgcatgaggcgtttaaaacggcgcaaaccttcagcggcccgcaggccgacaactttgctcccgtgctggcagacgaaccgttggctgaagaggggcaggcggaagcggtggttgatgcggcactgcgcccgaaacgcagcctgtggcgcaagatggtgaccgccgggttagccctttttggtgttagcgtaatcggccagggtgtgctgtggggcgtcaatgcctggcaaacgcaggactgggtggcgctggggggatgcgccgccggggcgttgattgttggtgcgggcgttggctcggtcgtcaccgagtggcgtcgcctctggcgtttgcgtcagcgtgcccacgaacgcgatgaagcgcgggatctgctgcacagtcacggcacaggaaaagggcgtgctttttgtgaaaagcttgcggctcaggccgggatagatcactctcacccggcgcttcagcgctggtatgcggcgatccacgaaacccagaatgaccaggaagtggtcacgctctatgcccacattgttcagccggtgctggatgcgcaggctcgtcgtgagatcagccgctcggcggcggaatccaccctgatgatcgccgtcagtccgctggcaatggtggacatggcctttattgcctggcgcaacctgcgcctgatcaaccgcatcgccagactgtatggcattgagcttggctattacagccggctgcgcctgttcaaactggtattgctgaatatcgccttcgccggggcaagcgaactggtgcgggaggtcgggatggactggatgtcgcaggatcttgcggcgcgtctctctgcccgggcggcgcaggggattggtgccggtctgctgacggcacgcctgggcatcaaagcgatggaggtttgtcgtccactcccctggatcgatggcgataagccgcggctgggggatttccgtcgcgaattaattggccagcttaaagagacgctcaataaaaaacctgctcagtgaggttttgtttactaatcgtgcgggctgtcaatatttgttgacagccaccttcccgaacaccgtgatctgacatatcattttactgttattggcttaaacggtgaatttcccatgcgtctggaagtcttttgtgaggaccgtctcggtctgacccgcgagttactcgatcttcttgttttacgtagcattgatttacgtggcatagagatcgaccctgtcgggcgaatttacctcaattttgccgaaattgaatttaataccttcagtagcctgatggcggaaatccgccgtatcgctggcgttacggatgtacgcaccatcccctggatgccgtccgagcgggaacatcttgcgctgagcgcgctgctggaagcaatgccggagccgtttctctctctcgatctgaaaaataaagtcgagcgcgttaaccaggccagctgccagctgtttgcgcagactcaggaaaaacttatcgggcaccacgccacgcaactgattaccggttttaatttccagcgctggctggacagcaacccgcaaaatacccatagcgagcatgtcgttatcaacggacagaatttcctgatggagatcacgccggtctacctgaaaggggaaaatgccgcgcgggtgctcaccggcgcggtgatcatgctgcgctccacggtgcgcatgggacgccagttacagaatctttccagccaggacgtcggcgcattcagccagattattgcggtgagcccgaagatgcgtcatgtaatcgaccaggcgcgcaagctggcaaatcttacggcgccgctgctgattaccggggatactggtacggggaaagatctgctggcgcatgctgtgcacatggccagcccgcgtgcggcaaaaccttatctggcgctgaactgcgcgtctattcctgaagatgcggtggaaagtgaactgttcgggcatgcgccggaaggcaaaaaaggcttctttgaacaggcgaacggcggctcggtgctgctggacgagattggcgaaatgtcgccacgcatgcaggcgaaactgctgcgttttctcaatgacggcacgttccgccgtgtgggggaagatcatgaagtgcacgtggacgtgcgcgtcatctgcgccacccagaaaaatctggtggagctggtgcagaaaggggtattccgcgaagatctctactatcgtctcaacgttctgacgctcaatataccgccgctgcgtgattgcccgcaggacatcatgccgttgacagaactgttcgtggcccgttttgccgacgagcagggcgtgccgcgtccgaagctctctgccgacctgggcaccgtgctgacgcgttacggctggccgggcaatattcgtcagcttaaaaatgcggtctatcgcgcattaactcagcttgaagggtatgaactgcgccctcaggatattctgttgccggattacgatgccgggacggtctcggtaggcgaagaggcaatggaaggctcgctggatgacatcaccagccgtttcgagcgttcggtgttaacgcagctttatcgcagctatccgagcacgcgcaagctggctaaacgtcttggggtgtcacataccgcgattgcgaataagctgcgcgagtatgggttaaatcagaagaagggtgacgaataaataaaaaagcctctttgcagaggcttttttacgtttaggctttaagcgcctcaagtgcagcggtgtaatccggttcggtagtgatttcgttaaccagctcactgaaaacaacgttgtcgttttcgtcgatcaccagcaccgcacgagcagccagacctttcagcgcgccttcggaaatggcaacaccgtatttttccaggaaatccgggctgcgcagagtggaaagggtgatgacgttgctcaggccttcagcgccgcagaagcgggactgggcaaacggcaggtcagcagaaatgcacagcaccacggtgttgttcatttcggtcgccagctggttgaatttacgcactgatgcagcgcaaacgccagtatcgatgcttgggaaaatgttcaggactttacgtttgccagcaaactggctcagcgtgacgtcagacagatctttagccaccagagtaaaaggctgtgctttgctgccagactgtgggatggaacctgcaacagcaaccgggttgccctggaaatgaacgagttgtgacatagatatcttcctgtttacaaatagttaacgtcgtggctagtgtatgtcatccgcagttagcacggcaaaccaattttctgcctttccggcctgcaaggagtcagtgatgagaagcgttaaggtctatgaagaagcctggccattgcacaccccgtttgtgatctcgcgcggcagccgtaatgaggcctgtgtggtcgtggttgaatgtgaagaggacggcgtaaaaggcgtcggggaatgtaccccttatcctcgctacggagaaagcctggcgtcagtcatggcgcaaattatgacggtggtgcccgagttgcaggcgggcctgacgcgtgaggctcttcagcttcggttgccggccggcgcagcacgcaacgcggttgactgcgcactctggagtctggaagcggcgaaacaacaaaaaccgctgcctgcgctgctggacgttacgctgccgcaatcgatcgtcaccgcgcaaacggtggtcatcggtgaaccagagcaaatggccgccagcgctcaggcgttgtatgccaccggtgcaaccttattaaaggtgaagctcgacgatcgtctgattagcgaacgcatggtcgccattcgtgcggcggtgcctgatgccactcttatcgtcgatgcgaacgaatcatggcatagtgaagggctggcagctcgttgtcaactgcttgccgatctgggcgtcgccatgctggagcaacccctatcggcagaagacgatgccgccctggcgaattttattcatccgcttcccgtctgtgcagatgaaagctgtcatacccgtgagagcctgtcagctctcaagggacgctacgagatggtgaacattaagctggataaaacaggtggattaaccgaggccctggcactggcacaagatgcccaggcgcaaggctttgctctgatgctgggctgcatgttgtgcacgtcaagagcgatcggcgctgcgctcccgctggtgaacagcgtgcgttttgccgatcttgacggcccaacctggctggcggttgacgtatcacccgccctgaattttacctccggtgtacttcatctttgaggctgccagcgcaggagatctgtcatcgcccgcaggtatttttcgctcgcttcatccgaggagatgggcggaaactctgcggtgatacagtgaaggctaaggtccgcgcaccagctgccaaacgacccgggtgtttcatagccaacgctgctcaccagaggtagagcaaacgcatccgccagccacttcccgagcgccgtattacgaggatcttcaatacaggcgaggggatcgtggaaagagacaacccaggccgggtggatcttatgaataagctggcacaatgcctgagtctccggttcggaaccgggtttgtctcccgtgagcaggaccacatctcgctcctgcgctgaactgttccagcgatacaccgtttcaccggcgcgccagtttgccgccgggaagttcctgttcaggtcaacgccgcgtgcattcgcccgtaatccaagctgacaaccgtccggattgacggtcaaaatcacatgatgacgtcgtaaatcgggggccagcgtacgtagcgcgcacgagagcgtcacgacagacgagttttcatcgccatgcgtgcccgcaatgattaagccgctattgcgatcggcctcgggtgccggaaaccagatcagcggcgcgcctaaaaacgagcgtccataatgttcagtcccgggcgggaaggcgccgcgttccgttcttggtcgggtagttgccatagtaaaccctgatgataaagtcacttctggcagtgttgtgcaaaagccgcgcttaatcaaatagtttccgtgtgtgtggaaaattgcctgacatcaactttccggaggaagcatttgcatttctccgtttcgaaacaaataattacgcatctgcctgttacctgacatcattaaggggatcgtatgaagcatcctgtttcgcttctttgtactgcgctgtggctgtgcgggctttcttcactttcatatgccgcggaggttcccgaaggaacggttctggcgcaaaagcaggagctggttcgacatattaaagatgagcccgcttcgctcgatccggcaaaagcggtggggttgcccgagatacaggtgatccgcgacctctatgaagggctggtgaatcagaacgaaaaaggggagttagttcccggcgtggcgacgcgctggcagagcaatgacaaccgcgtctggacgttcacgttgcgggataacgctaagtggtctgacggaaccccggtgacggcacaagattttgtctatagctggcgtcgtctggttgatcctaaaacaacgtcacctttcgcctggtttgcggcgctggcgggcattaacaatgcccaggccattatcgacggcaaagctgctccggataccctcggcgtgacggcggtggatgctaaaacgttgcgcgtgcagctggacaaaccgctgccctggttcagcaatctgacggctaatttcgcgttttatcctgttcaaaaggaccaatgtggnnnnnnnnnnnnnnnnnnnnnnnnnnnnnnnnnnnnnnnnnnnnnnnnnnnnnnnnnnnnnnnnnnnnnnnnnnnnnnnnnnnnnnnnnnnnnnnnnnnnnnnnnnnnnnnnnnnnnnnnnnnnnnnnnnnnnnnnnnnnnnnnnnnnnnnnnnnnnnnnnnnnnnnnnnnnnnnnnnnnnnnnnnnnnnnnnnnnnnnnnnnnnnnnnnnnnnnnnnnnnnnnnnnnnnnnnnnnnnnnnnnnnnnnnnnnnnnnnnnnnnnnnnnnnnnnnnnnnnnnnnnnnnnnnnnnnnnnnnnnnnnnnnnnnnnnnnnnnnnnnnnnnnnnnnnnnnnnnnnnnnnnnnnnnnnnnnnnnnnnnnnnnnnnnnnnnnnnnnnnnnnnnnnnnnnnnnnnnnnnnnnnnnnnnnnnnnnnnnnnnnnnnnnnnnnnnnnnnnnnnnnnnnnnnnnnnnnnnnnnnnnnnnnnnnnnnnnnnnnnnnnnnnnnnnnnnnnnnnnnnnnnnnnnnnnnnnnnnnnataacgccaggacggtgcttaaaaaagtcacctttgtgccgatcaaccaggagtcctcagcgaccaaacgctatctggcgggcgatatcgatattacagaatcgtttccgaaaaacatgtaccagaagctgcttaaagatattccgggacaggtatacacaccgccacagcttgggacctattactacgcgtttaatacgcaaaaaggcccaaccgcggatgcccgcgtacgtctcgcgctcagcatgactatcgacagacgtattatggcggaaaaagtcctggggaccggcgagaaaccggcctggcattttactcccgatgtcactgcgggttttacgccggaaacctcgccatttgagcagatgtcgcaacaggagctaaatgcgcaggcgaaaacgttgttgcaggcggcaggctatggccctcagcgcccgcttaaattaacgctgctgtacaacacgtctgaaaaccatcagaaaattgcgattgccgttgcatccatgtggaagaaaaatctgggtgttgacgttaagttgcagaatcaggagtggaaaacctacatcgacagccgcaataccgggaattttgacgtcatccgtgcatcgtgggtaggggactacaatgagccgtcaacattcctgtcgctgctgacatcctcccatagcgggaatatctcacgattcaacgatcctgcttacgataagattattcatcaggcgacgctcgaaaccactgaaaaagcgcgtaatgccgactacaacatggccgagaagatcctcaccgagaaagcaccgattgcccctatttatcagtacaccaatggccgtctcatcaagccatgggttaaaggttatccgataaataacccagaggatgttgcgtacagccgtacaatgtatattgaaaagcattaaaaagaggtcagggcgctacgtgattatggtaaacatccattaaccgcataagcgcccgctctaagggggtatgattttacagcctggttaataccgaatatccccttcatatcagcccatcactcattgtcatgatgaatatcttcagagagattctttctcccgtttatcgaaaaacgcgtagtcatttattcgccattcctgtagcagtatagtcattactgttttcaagattaaatttgtccgatacaggattttttcatattcaggccatttattgaattaaaaccttatttctctgcgctgttacggggcgtgttaataaatgcattgatgtaaatcaattattcaacctcatggaacaataagttcaatatttccaaacaaagcagtcattcctgccaaattaatgtgaataaatggttaatttttactgtatgtcatgtatctatggcatttatgagtacaataatttagtggaatattcttaagaaaagtccaattgtagatctttgatctgagaggttgattttaaatgggcttttgctctaatatggttttgtaaagaaacgacactcacttaacatttatttcttttaaagaaagggactgctatggccgattcattccagaatgaggtgcccaaggcacgtataaatttaaagctggctctgcatacaggtggcgcgcagaagaatatagaactgccgcttaaactcctcaccgtcggtgatttcagtaatggaaaagagaatcgcccattatcggaaagggacaaaattaacgtcaataaaaataacttcaacagcgtactttcggaatttaacccggaagtgaatctgacggttcctaacacaatggccggggatggttcggaagaaagcataaaactgaatttctccgatattaaggatttcgaacctgaacaggttgcccgccagatcccccagctccgcgccatgctggccatgcgtaatttattacgcgatctcaaatccaatcttcttgataacgccactttcagaaaagaactcgagaaaattcttaaagacccggcgctgtctcaggaattacgcgacgaaatgagtgcactggccccgaaataagcggcatgtgtaatttaatggattaaccgggaatatgctgatgtctgtaaatactgaaaccgcctccgcgcaggggcagaccaccgtactggaaaaagagggcgtttacgcctccctgtttgaaaaaatcaacctgaccccggcctccagcctgggggatatcaatgcgtttctggatgacgccgcgctttctgacgctccggcgggtgaacgcctgacggcggcgatgcaggtgtttatggactgcatccgcaaatccggtcagcctgtggagaagctcgacaaaacgctgattgaccaccatatcgctgagctggatttccagatcagccgtcagctggatgccgtaatgcatcaccaggagttccagaaggtggagtccctgtggcgcggcctgaagcagctggtggacagcaccgactaccgccagaacgtgaaaaccgaaattctggatgtgtcgaaagaagatctgcgtcaggactttgaagacgcgccggaacttatccagagcggcctctactggcacacctataccgccgaatacgacaccccgggcggcgagccgattggctccgtgatttcatcctatgaatttgacgccagcccgcaggatgtggcgctgctacgcaacatctctaaagtgtcagctgccgcacatatgccgtttattggctctgtcggtccgaaattcttcctgaaagactccatggaagaggtcgctgcaattaaggatatcggcaactacttcgaccgcgcggaatacatcaagtggaaatcgttccgcgacaccgacgacgcccgctatatcggcctcgtgatgccgcgcgtgctggggcgtctgccgtatggcccggacaccgtacctgtacgcagctttaactacgttgagcaggtgaaaggcccggatcacgagaaatacctgtggactagtgcgtcgttctccttcgcgtcaaacatggtaaagagcttcatcaataacggctggtgcgtgcagatccgtggcccgcaggcgggcggggcggtgaaagacctgcctattcatctgtacgatctgggtaccggcaaccaggtgaaaatcccgtctgaggtgatgatcccggagacccgcgagtttgagttcgccaacctcggctttatcccgctctcgtattacaaaaaccgcgactatgcctgcttcttctcggcgaactccgcgcagaaaccggcgctgtatgacaccgcagatgccacggccaacagccgcatcaacgcccgtctgccgtatatcttcctgctgtcgcgtattgcgcactacctgaagctcatccagcgcgagaacattggcaccaccaaggaccgccgtctgctggagctggagctgaatacctgggtgcgtagtctggtgacggaaatgaccgatccgggcgatgagttgcaggcttctcatccgctgcgtgacgcgaaggtggtggtggaagatatcgaagacaacccgggtttcttccgcgtgaagctttttgcggtgccgcacttccaggtggaaggcatggatgtgaacctgtctctggtgagccagatgccgaaagcgaaagcgtaacgtaaggcaggaagcatgaaaacggaacaaccgttatggggcaggggccagatggtctctccccagcacttccagcaacaggccgcctatgcggcctggtctgcggaatgtatcgcccgactgggtctctcccatccctggggggtgattaatgccactttcgaaccggatgtactgaagttgggccgtctacaggcccgtcatctgcacctccggttccctgacgggacattaatcgatacggataatgctgacgacctgccaccggtgctggcgcttgagagtgaaacacaggacgtggtggtggttctggctcttccgctgctgcgcgcgaatggtggcaactgccttaagcccgatgaggtggccgcgcgtcctgttcgctatcgccagcgctggcgggatgtccgcaacctttttggcgatgatacccgccagattgcggtgatgcggccagagctgacgttgcgatttgcccatcagaacaacagcgattacctgacctgtccggttgcccgcctgcaacaagattcgcaggggaactgggcacttgatgagacataccttccgccgctgttggcgttactgggcagtcgctggctgatgacccagctggagcaactgttgacgcaactgcgcgcccgtctgggccgcctgatggacatgcgccgggaaagtaatgagcgcatggcggattttgccgtagccgatgtttcattgttctggctgctcaatgccctgaacagtgctgagcccgtgctgggtcagtttcagcgccacccgcaaagcccgcctgagcgtctctatccggagctggcaaggcttgcaggcagcctgttgacattctcgctggagcatcaggtcagtgcgatcccggcatggcagcatgagcagctgaataacgtcttcccgccgctgtttgatttacttggcgatcttctggaagccagcctgccgtcgcgggtggtggcaattgagcttgagcatgatgaccggcttcacttctggcaggcccgtctgcatgatccacgtctgcgcgaaggggctgattattacctctccgtgcgttcaccgatgccggtggcacaattgcaggagcagttcccgcgccagtgcaaggtcggcagtcccgatcatgtcaggagtatcgtcaattcatcgcgggtgggcgtccctctgatgccgctgcgccatgtgccggcagccattccactacgtctggaaaatcagtatttcagccttgatgtctctcatcctctggccatcgaaatgttccagagcggcacctgtatgttttacgttccgggaatgctcgccgagcctgaacttgaactctttgcggtactgagaacatgaatgatcgtaaacgcgctactgccgcgttcattgatattgatgccctgttacaggacacctggctacaggtgatcagtctgcgtcacggcccgacattccaggacggggaaggtcgtacgctttgggagcgctgcattgatgatgtcgggcgtgtgcagcgagaactgaaagcgagcgaactcgatgaagccagctgccagcatattcttacggcacagtgtgcgctgcttgatgaggcggtcaaaggtcgcggtgtagaggatgacgcctgtatacagtggtatgacattcccttacagggatactttcttggcaccatggacgccggtgacacgttatgcgatcggatgcgtgatgtgctgcgtgaaccggctcctgaccacgccgttgtgacctgcttccagcgagtcatgatgctcggattcctcggcaacttccgctccctgaacgatcctgagcggcagaaactcatgaatgcactgaatgaatatgttgcgccgttcagctattcacaaccccatcccgttctggcggaaagccatgccggacgggggatagggggttggctggcatcatggcctatgcgcattggcctgagtgtggtggtggtcaccgcattatggtggggactggattgctggctggatcagacactgcttaccctgctgccgggagccgtgaaatgagccctgcacaacagcgcgggcttgcgctctgggctgccctgctgagtgcagtggtctgcctgtggtttctgccagcatcccgtctggtttccattctcgtcctgctggcggtactgggactcatcatagcgttctgggctgtcgcctgccgtcgcgtgcagcacgatttcaccctgtgtctggaggacctgcctgaagccaattattgtcagcccgtggtactggtctgtggcgatctgccgcttgcctggccgcatcagtcacctgtgcttactgtcacgcagggctgctggatccgtgtggaggatcatctggaactggagcaggccgcccgtcaggtactgtggttgcgccccgactggggacgtcagctgtcagtgatggtcagtgtttgtccgcagcagcaccctgacagtgagcgccttaccagtcgtttgcttgccctgcgctggcagattagccggttgcgtaaagcaaccggccattctgtgccactggttctgaatggacaggtcggcagtgcgatgatgaatgacatgctctggcagacggcgatcctgggggaaggggtaaaggtctggagtgggacttcagcgcctggcttagttgctgaatgggttaatactggcggaacgcctgcgatgcagcaacaggtgctgatgaacagcctgatgagctggttccaacagcacgtccaggctgtccttatggatgaaaaccccgatattcctgtcattgaacctgttgcggttctgtggggattgggtccgatcctgaccggaagcatggtcacctctgtctggacagcgtggttgtcccgccatactgcgatgcagcaggtgtctggctggcagccggcgggaacggacagtacggttatttccctgttcccgaattttgtcctcccgttactgccagaaggacgaggcctgacaccgcatggtcgaacctggcgcggtgcgctcggaatcttaacgctggcgaccattgctgcgctactcagcagtggctggaataatcgccagctgttgcaacgcgtgagcttcgatattgcacgctatgaacgtataccgatgaatgactccgggccgaaagctgacgccgttgccgtgctgcgcgaggatgcggcattgctggacgaccatgcacgtaacggtgtaccggcccggctgagtctgggtctgtatcagggcggacgtctgcgtatgccagtgctgaatgcgattcgctcttatgtgcctccgcctccgccgcctgaaccggaactcaaaccggcaccgaaaattgtccgcctcgacagcatgtcgctgttcgataccggaaagtgggcgcttaaacccgcctcaacaaagctgctggtgaactcgcttgtggggatcaaggcgaagcccggctggctgattgtggtcgcgggccataccgacagcaccggggatgaccagtccaaccaggtgctgtcgcttaagcgtgcggagtcggtgcgcgactggatgcgggataccggcgatgtgccggagagctgttttgcggtgcagggctatggtgaaagccgtcctgtcgccaccaacgacacggcggaaggccgggcgctgaaccgccgtgtcgaaatcagtctggtaccgcaggcgaatgcctgtcaggcgccgggcacgacccatgcgtcatctcaggatgatggcgctgataacaatgtaacggagtaattaacatggcaattccagtctatctgtggctgaaggacgacggcggcgcggacatcaaagggtccgtggacgttcaggatcgtgaaggcagtatcgaagtggtggcccaggagcacaacctgtacatcccgaccgataacaataccggcaagctgaccggcacccgtatccacaccccgttcctgttcaccaaggaaatcgactcctccagcccgtacctgtacaaggcggtgacgaccggccagaccctgaaatctgctgagttcaaatggtacagaatcaatgacgcaggccaggaagtggagtacttcaacacgaagcttgagaacgtgaagctggtgaaagtgaatccgaagatgcatgacatcaaggatcctgctttcgagaagcacaaccacctcgagcagattgaactgcgctacgaaaaaatcacctggacctacaaggacggcaacatcattcattccgattcctggaacgaacgcgccactgcgtaagagccctgagcagacggtcagccgtctgctttttttgctgagcgcctgcactgacgggtggtcagcaaagaaaaacacaatctgcctgcccgacctgatgcgctttgggttcctgaataacagggaacagcgacgggcggtagcgtgtccggaactgataaagagagagtctcatggaaaatccagccatcctgttacgccgtcttaacccttactgtgcccgcgcaatggaaggggccgcttccctgtgccagacccgcgcccatgcggaaatcctgcctgagcactggctgctgaaactgctggaacagggtgagggcgacctgacggtgctggcgcggcgctacgaatgggatatggatacgatatggcaggatatgctgggttttctggacagcctgccacggtcggtgcgcagccgtccgcagctttcggagggcgtgaagtcccttatgcaggacgcctggctgcacgcctcgctgtcgggggaagagcacatccgcagcattcacctcctgatggctctggtggaaaaaccgaaactgctgcgctgcgacggcctgtggccgctgctgacgctggcgcagagccagcttgagcgcctgcgtggacttctggatgcgcagtcggatgaacgaccggaggtgcagcaggaagcggagcttacgcagggggatgaggtggagtttgtcggccgtccggtgaatgcggatataacaggagagctgaacccggcgttgcagaatgcgctggacaggttcaccctcgacgtcaccgcccgcgcccgtgagggcagaatcgacccggtctatggccgcgacaatgaaatccgccagatggtggacattctttcccggcgccgcaagaacaacccgattctggtcggcgaaccgggcgtcggcaagaccgcgctcgtggaaggactggcgctgcgcattcatgagggcaatgtgccggacgcgctgaagccggtctccgtgcgcacccttgacctcggcctgttacaggccggggcgggtgtgaagggggaattcgagcagcgcctgaaaaacatcatcgacgcggtgcagcagtcacccctgccggttctgctcttcattgacgaggcgcacaccattatcggcgcgggcaaccaggcgggcggcgccgatgcggccaacctgctgaaaccggcgctggcccgcggtgagctcagaaccattgccgccaccacctggagcgaatacaaacagtactttgagcgcgacgccgcgctggagcgtcgtttccagatggttaaagttgatgaaccggacgacgacaccgcctgcctgatgctgcgcggactcaagtcacgctacgcggagcaccatggcgtgcatattaccgataaggcagttaaagccgccgtcacgctctccagacgctatctgaccggacgccagcttccggacaaggcggtggatttgctggataccgcctctgcccgtgtccgtatgagcctggacactattccagagccgctgacccgcatgaaggcgcagctcacggcccttgctatggagaagcaggcgctgctggaggatatcgcggtgggcaataccgcccacggcgaacgtctggccgccatcggagaggaagaagtcgccatcattttgcagctcgacgaacgggaaacccggtacggccaggagctgaaactgacggaagaactgcttgcctgccgcacggatatctcccgtcagggggagattgcggaccttcagatgcagcttactgccgtgcagcagaataccccgctgctggggctggatgtggacgcgcgtaccgtcgccaccgttatcgccgactggacgggcgtaccgctctcttccctgatgaaggacgagcagacggaactgctgagccttgagcacagtctggcgaaacgcgttgtcggtcaggacagtgcgctgaatgccattgcgcaacgcctgcgcgccagcaaaaccggtctggcgcctgagaacggcccgcagggcgtgttcctgcttgtggggccgagcggcaccggcaagaccgaaaccgcactggcgctggccgatgaactgttcggcggcgagaagtcccttatcaccatcaacctttcggaataccaggagccacacaccgtttcgcagctcaagggctcacctccgggctacgtgggttacggtcagggcggcattctgaccgaagccgtccgtaagcgcccgtacagcgtggtgctgctggatgaagtggaaaaggcgcaccgggacgtgatgaacctgttctaccaggtgtttgaccggggcgtcatgcgcgacggcgaggggcgggaaattgacttccgcaacacggtgattctgatgacctccaatctcggcagcgaccttatcatgcagctgctggatgaacagccggaggcgacagagccggacctgcatgaactgctgcgtcctgtcctgcgggaccacttccagcccgcgctgctggcgcgcttccagacggtgatttaccgtccgttggcaaaggcagcgatgcgtaccattgtggagatgaagctggcgcaggtcagtaaacgcctcaaccgtcactacggtatgaagaccgatatccacgaaagcctgtacgacgcgctgaccgatgcctgcctgctgccggacaccggggcacgcaatgttgacagcctgctgaaccagcagattctgccggtgctgagccagcaactgctgatgcatatggccgcgaaacagaagtcgcataccctgacgctcggctgggatgaggaagagggcatagtgctcgagtttgaccggacacaaggagtgcacgcatgagcagcaatcccccgctaagattcagccacagccatcacctgctttcggtgaagggctgcgatgcagggcttgatgtgctggcgtttgagggtgatgaagccctgagcacacccttcagctaccgtattgagttcaccagcacggaccatgccatcagcaaagagatgatgctgatgaaagcggcttccctgacgcttcaggccccggttgaccagggttacggcatcaaaatacagcagccggtgcgggtgattcagggcgtggtcacgggttttgaacgtctgggtacctcaaaggatgaaacccgttacgcagtgacgcttgagccgcgtctggccctgctcagccgctcgcaccagaacgccgtctaccaggacatgtccgtcccgcagattgtggagaaaatcctgcgcgagcgccacggcatgcgcggccaggacttcctgttctcactctcaaaagagtacccgcgccgcgagcaggtgatgcagtatgctgaggacgacctgcactttatcacccgcctgctgggtgaggtcggtatctggttccgcttcaccaccgacacacgcctcaacattgacgtggtggagttttacgacagccagcagggatatgagaaaggcgtgacgctgccgtcggtgccgccgtcagggcagcactcgcagggtgtggactcggtgtgggaaatggagagccaccataatgtggtgcagaaggcggtcagcacccgcgactacaactaccgtcaggccacgcaggacatgaacaccctggttgatgcgacccgcggggatgccaccacgtacggagatgcctatcactgggcggataactacctgacggcgggcagcgcgtatgaccgcaacccggcagcggagtccggtgcgttttacgcccgcatccgtcacgaacgctacctgaatgaccagacgcagaccgttgccttcaccagttgtccggagctctctccgggtatgctgctgaaagtcaccggcgggtacgaagtggccgacgtgtttgcgcagggcgtggttgtcacggcgatgcacagccatgcgcagcgtgatgcggacttttgcgtcaggtttgacggtatcccggacagcccggatttcagttttcgccctgagcctggttcacgtccggtgatggccggtaccttaccggcccgcgtcacgagtaccactgaaaatgacacctacgggcatatcgataaagacggccgctaccgcgtcaacatgctgtttgaccgtgagaactgggagaccgggttcgagagcctgtgggtccgtcagtcccgcccgtatgcaggggacacgtacggcctgcacctgccgctgctggcaggcaccgaagtggcgattggctttgaggacggcaacccggaccggccgtacattgccggtgtgctgcacgactcggcgcacggcgaccacgtcaccatccgcaactacagacgtaacgtcctgcgcacgccggtgaacaacaaaattcgcctggatgatgaacgcggaaaagagcatatcaaggtcagcacggagtacggcggcaagagccagctgaatctcggccacctggtcgacagcgagaaacaacagcgtggcgaggggtttgagctcaggacggacagccggggcgccatccgggcgcagaaggggatttttatcagtgctgacggccaggcgaaggcgcagggccaggtccttgatatggagcctgcactcgcacggctttcagcagcattagtggaaatggaatcccttgctgcctgcgcacagcaggctcaggctctggctgccgatgttggccgtcagcaaaaactcctgaagcagaaaattgaacaactgcatgaagaggtgattctgggcagtgcgccaaaaggcatggcactggtgagcggcgaagatatgcagctatcagccagtgataatatgacactgacagcgggtaaacagctggatgttggtgcgcagaatgactttacgctggcggccggtaagcaactcagcctttacagccgtgaaggggcaaaactgttcagctcgcaaaacgacattgatattcaggcgcagggcggaaacatcaccacatggtccacacaggatacgcatgtttcaagcggcaggaaaatggtcattacagcacaggacgagctgacgctgatatgcggaggcggctacatcaaaatcagcggtgggaatgttgagattggtggtccgggtaaactgctgattaagaacacgggcgtcaggaaagcgggcacgggcagtatgcagggggtgatgaagtcgtttgaaccttctacgtttgatgagaaatttgttatcagaaatgcattaacccaagagccgcttctaggaaaagcctataaaataactatgccaaacgggtcagttgtcactggtataacagacgcgcagggggcaacgacgcttaattcttcggatttgatagatgatatgataataacacttactggtcgttaaataatattaatggaatacatatgttaggattaatgctctttataatgtgtttatattctcttgtaattggtagcatcttatatatttttattggctttttgcataaacctattgatggtgggtggaaaaaagcaggcaagtggtgtatgtgtgtggttttatcatatttaattatatatatcctccaatcacatggtgtcccagtaataagataagtggcggcttgtctaatagataaaaaaggatgcttctaatgagtgaaaaaacagatacaaccagggctttagagttaaagtatgacgacaatggaaaaccttcatggcgttcatgcccttctcataaaaatataaaggtccgcggaggatgtgatttacctcctcatctccctggtttgataatactcgtccatggggttaactcaacaggtgaatggtatcaaaatgcggaagagtctctctgcaaaggattaaatgacaggttagggctcaatggttctcaatttgaattgaagccgaacaaatatagtacagattgtgagaaggaggaagggaaaagtaactcgtcaccttcacctttagctcgtagaaaacttattgaaaattctgagcgctctccaatcattcgattctattgggggtattcttctgtgaggggggaagaggataaatatattatcccgttagctaatgcggatggtgaagattatcatgaaatgaaaagaacaggtataaaacaagatgacattcaaaaaaaagggccatatatatggggaggtggcccattccaaaatggcacgaataacttacactcgctttggagtgactatggattcgatgagaatctggcgggaatctctggagcaaaacttcagtatctcaatgaagataaagatagacttttaacaaatgctccaccaagaaaatactattcacatgcagctaagagattagcagatcttttagaccttatccgggataaatatccaaatgatacggttagtattatctctcatagccaagggacaatgatttcgctagccgcagtcgcattagcaaaaaaagggccagatactctttttatattaaactccccttatgcaatgcataatagccagcttaatgagctttcaattcctcagaaagagagaatttctccaagcggacgcgaaaatacattatcatcaataattgaaaaaattgcaaagcaatccacgcatctgtcttctgtgggttataaagggttatgtgtaggcaagtttactgataaaacgaattggaagcctgaaggtgagaatgtaatacgggctggaaaaatacaagagcgtgataatcatggcagaacgtatatttatttttgccctcatgaccgagtgatggggtcattaccgcttcgctcgatagggtggcaagggctacctaatgataaaaatggtaatccacatccattaattgtgaaatttaaaaataatttgtaccagaggatgttggccaggaatacgccatgcggttcttatcctgataagcagacaccatttggtactttacctgatggaaaaccattttgggatgatgatggtgataaatatcaaagtagtagcattacatatcctgaccctccaaaatggcaaacagtgtttgtaaatgcagagaaagtccctgagcctattaatcccagtgagttggccgaatttgacgaaaccagagtnnnnnnnnnnnnnnnnnnnnnnnnnnnnnnnnnnnnnnnnnnnnnnnnnnnnnnnnnnnnnnnnnnnnnnnnnnnnnnnnnnnnnnnnnnnnnnnnnnnnnnnnnnnnnnnnnnnnnnnnnnnnnnnnnnnnnnnnnnnnnnnnnnnnnnnnnnnnnnnnnnnnnnnnnnnnnnnnnnnnnnnnnnnnnnnnnnnnnnnnnnnnnnnnnnnnnnnnnnnnnnnnnnnnnnnnnnnnnnnnnnnnnnnnnnnnnnnnnnnnnnnnnnnnnnnnnnnnnnnnnnnnnnnnnnnnnnnnnnnnnnnnnnnnnnnnnnnnnnnnnnnnnnnnnnnnnnnnnnnnnnnnnnnnnnnnnnnnnnnnnnnnnnnnnnnnnnnnnnnnnnnnnnnnnnnnnnnnnnnnnnnnnnnnnnnnnnnnnnnnnnnnnnnnnnnnnnnnnnnnnnnnnnnnnnnnnnnnnnnnnnnnnnnnnnnnnnnnnnnnnnnnnnnnnnnnnnnnnnnnnnnnnnnnnnnnnnnnnnnnnnnnnnnnnnnnnnnnnnnnnnnnnnnnnnnnnnnnnnnnnnnnnnnnnnnnnnnnnnnnnnnnnnnnnnnnnnnnnnnnnnnnnnnnnnnnnnnnnnnnnnnnnnnnnnnnnnnnnnnnnnnnnnnnnnnnnnnnnnnnnnnnnnnnnnnnnnnnnnnnnnnnnnnnnnnnnnnnnnnnnnnnnnnnnnnnnnnnnnnnnnnnnnnnnnnnnnnnnnnnnnnnnnnnnnnnnnnnnnnnnnnnnnnnnnnnnnnnnnnnnnnnnnnnnnnnnnnnnnnnnnnnnnnnnnnnnnnnnnnnnnnnnnnnnnnnnnnnnnnnnnnnnnnnnnnnnnnnnnnnnnnnnnnnnnnnnnnnnnnnnnnnnnnnnnnnnnnnnnnnnnnnnnnnnnnnnnnnnnnnnnnnnnnnnnnnnnnnnnnnnnnnnnnnnnnnnnnnnnnnnnnnnnnnnnnnnnnnnnnnnnnnnnnnnnnnnnnnnnnnnnnnnnnnnnnnnnnnnnnnnnnnnnnnnnnnnnnnnnnnnnnnnnnnnnnnnnnnnnnnnnnnnnnnnnnnnnnnnnnnnnnnnnnnnnnnnnnnnnnnnnnnnnnnnnnnnnnnnnnnnnnnnnnnnnnnnnnnnnnnnnnnnnnnnnnnnnnnnnnnnnnnnnnnnnnnnnnnnnnnnnnnnnnnnnnnnnnnnnnnnnnnnnnnnnnnnnnnnnnnnnnnnnnnnnnnnnnnnnnnnnnnnnnnnnnnnnnnnnnnnnnnnnnnnnnnnnnnnnnnnnnnnnnnnnnnnnnnnnnnnnnnnnnnnnnnnnnnnnnnnnnnnnnnnnnnnnnnnnnnnnnnnnnnnnnnnnnnnnnnnnnnnnnnnnnnnnnnnnnnnnnnnnnnnnnnnnnnnnnnnnnnnnnnnnnnnnnnnnnnnnnnnnnnnnnnnnnnnnnnnnnnnnnnnnnnnnnnnnnnnnnnnnnnnnnnnnnnnnnnnnnnnnnnnnnnnnnnnnnnnnnnnnnnnnnnnnnnnnnnnnnnnnnnnnnnnnnnnnnnnnnngaatgtaagtttgatgataatgggcatccttcctggcgttcatttccctctcataaaaattgccaaatcagaggtgggtgtgatttacctccacatttgcctggaattattattcttgtacatggtgttaactcgacaggagaatggttttcatttgctgaggacaaaatttgtgaaggcctgaataagagacttggattaaaagggactgattataaactggtggctaataaatatttttctgatgaaaaaatagagattgaacctcttatagaaagagatttgcctgcgcctaagaaggaaacctctccagtcattcgcttttactgggggtatgcttcacctaaaggtaatgaagataaatatgatataccgttagccaataggaaaggcgttgattaccatcacttaaaaaggcaaggcatgcctcatgaaaatattattgctcaggggccatttttctggggcggcgggccattccagaacggtacaaataatctgcactctttatagagtgagacagggtttaaagagagagtagcaggtatcaaagtccagtggtttaatgaagacaaagatcgcctgttaaccaatgcgccaccgcgaaaatactacgcgcatgctgcaaaacgccttgcagacctggttgacagtattcgtaataaatatcccaaagatacagtaaccattatttctcacagccagggaaccatggttgcaatggctgcggtagcgatagccaggaatgcacctgatgcattatttgtacttaattctccttatgcactggatcataacgatcttaatggggcgtcacttccggcagatgagtgcatttcgccagaagggcggcagaatacgttatctgccatcattgataaggtggcttccagaaaaaatcatttatcatcactgggctatgaagggctttgtgtcggacagacggcagataaaaagaactggcgaccagatgtcgctcttgccagtgaaagtggcagcagtcttgccgaacgagataaccacggacgcacttatatttacttctgtcctcatgatcgagttatggggtcacgtccgctacgctcaattggctggcagggattacccaataattctcaggggcagcctcatcctctgctgaaaaagcatcagggaaatttatttcagcgcatgctggctcgcagtactccatgtggcgaagcgccaaatcccgcaacaccttttgcaaaattgccggatggtaaaccgttctgggatgataaaggcgacaagtatcaaagcagtagtttcacctatccagatcctccggaatggcaaacggtttttattaatgccgaaaaggtacctgaacctatagatgctgcaaaattagctaattttgatgtatcacgtgttggagctgaacacgatgacagacagatagatggctggggggaaattaatccggataaaaatctaaaaaacgacaatacctatgacaattacatcaatttataccccaatcaggatattgtgattggatttaaaaatgtgggaactgaatctgagccccgaatggtgcctgtgacccgtaaggagacatttgaagaaaaggatcttcgcataagaacctatgtttctcagcccacggatcatagtactcttcctatgcgtgctgatttcatgtctcaggtggtggcatatgatttaccgattgggtattgcgatgcaacctgggataaagaatttatggcagatttacggcgaaaagcggactggacgcagggagaggatccttatctctccagtggagagccagacaaagtacctgaacctgatttaattagtcaggacactgttgttgatgaattttataaagagcaaagtaagctgccagcatatagagctgtaaataaagcataaacacacttcggtaggttgttgttcagtgagtttgctaaaattcaacgctatatagtcagttgttttcttcgaattaaaggattagcaaatggggaaatttgtcgtcgttttaggggatgccactacgcatggtggcaaagtcacatcagcctcatccagtttcgatatatccggtaaaaatgccgcacttttgaatgatactgtcagttgcccggaacacggtatgaataaaattattgaatgcgatgtttctgcgtatgaagaaaacgggcgtggaattgtattgcatggctgcaagacgcagtgtggttcgagtgtcatcgcaagtatgccggatatggaggttggctgatgggatggtctctgccggaagtgcctgaaaaagagcaggcaccatcctggtcaccgtggaactgtctgttgattattattctcggacttttcaccgggctgcttgttgctgtactgaaatctccggcgacagggttactttcattgagcagtggggcctggttgccactgacggcctggacatttgcgggcatttcggctgccatcgcggtctacactttcaggcaggaaatgctggcagttcgtgtctggaactggaatgagtggtgccggaacatgcgtctgaagtggcgcttacgtgcacaacagcatcttgtcattctcagccatgttttcattactgccgatacgggactgttagatcgtctcgcacatacgcaggaagaggaaagtgcagacacatcgcctctcacgatgttgccagacgaaccgcttacacccggtatttcacgttttgagcagctgcttcgtcatctcattgctcagataatgccctcgattcggcggcgatatccttccggcccactccagattattgttcagaccaacggtagcgacaaagaccgtgaatctcagtcattctatcgtatctggtcagcaggttcccctccctggaaagctgagattcattttcaggacgcagactcatcctttgatggctggaatcagtttgtggcgtcaacaaagcggcccgtactggtactggcaatgcactatcgtttgcccaatgatgttctgccggaatttgccagcgcgttatttttgatgccaccatcgatgctgaatctgggtgagcaaaaaaatgcgttacggcttttccgggcgatgccgctcaacacccgtatgcttgcaacggaactcactgaattacgggaaatggccctcacgcctgccagcaagaaacaccttgtctggcacagtgggctctcagatgcgccacgacagtcagtgagcagggtgctgaatgatctgtcggttcctttgtacgatagcattggcactggcggtgtcattgactatgacaccgccagtgtccggtatggcggtcttgctggctgggcaatgactggcgctgcggctgagatggctgcttatggccccgccagccagtggcttcttctcgaaggtgaagacgatgcctgggctgtgtcgctcggaaacgccgttcctgcagtcgggcatgatcatttcgtgattcagcctccctttcccgggggatctgttcttatggcattactgcttaatgctgggctgtacagtctgatgatccgctatttcccttcaactgcattctcctgggcagggatctctcttcttctgctttcaatgattgtgacattgcctgggctggccattttgctgagacgaattacagcccgtcttcagcgcccggaatttatcagggttgcacgacactccggaaaggaataaccggcatgaaaaaggtttcaaagccactgggagcaggactacttatcgtggcagttctgctgatgatactctttatttttgcacagacagcgcagttaccgtccggtagcggtgacgataatttctggtatgtgctggcaggttgcatcattctgaccgccacattatgcaccctggtgttctttacgttgtccaggcaacaaaatccctctcccgttacgcctgatggtgaaaacaatcccaacgaagaaagcgcgtcggatcaatatgatttttcagcactgagcaggaatctcagaaggcggcactcgttcttctggcggcgtaaagtccgcctgctgctgatcaccggcgatgaagccgcgattgagcaattggtacccggcctgcaacagcagcagtggcttgaaggcaaccgcaccgtgctgatttatggcggcagcctggcatcggagcctgaccgcgaaaaatacacagcgctgcgtaaactacgccgcgggcgccctctggacgggattatccgtgtactgcccgagtcgcttaagctgaccccacatatcagcgacagcgatttacgcggcctggaaaaaatcagcgaactgctgcgttattccgctccggtctggctgtggcaactgtgcagcagtcactggtcgcagggtacgcgtcctgagcaggcggtaggcgcaagctttccaccacgcgcaaaagaagacgatgtgatccgccagctggaactgatgctgccggccctgcggacgcaggggatgagtcaggtcgcggaaaacagcagccacgacttcctgctgcgcctgagccagcacctgaacgacggtgctattgcccgctgggctcagcagttgcagccatggctctttgtttctcagcagcgcgtcccgctacgtggtctgatgttcagcctgtcggagaagaaacctgccggaatgtcagcgggaacagccgacgctgagaattatggatcacagcgtcatnnnnnnnnnnnnnnnnnnnnnnnnnnnnnnnnnnnnnnnnnnnnnnnnnnnnnnnnnnnnnnnnnnnnnnnnnnnnnnnnnnnnnnnnnnnnnnnnnnnnnnnnnnnnnnnnnnnnnnnnnnnnnnnnnnnnnnnnnnnnnnnnnnnnnnnnnnnnnnnnnnnnnnnnnnnnnnnnnnnnnnnnnnnnnnnnnnnnnnnnnnnnnnnnnnnnnnnnnnnnnnnnnnnnnnnnnnnnnnnnnnnnnnnnnnnnnnnnnnnnnnnnnnnnnnnnnnnnnnnnnnnnnnnnnnnnnnnnnnnnnnnnnnnnnnnnnnnnnnnnnnnnnnnnnnnnnnnnnnnnnnnnnnnnnnnnnnnnnnnnnggtattgtcgacgactgcacccgcgtacgtggccgtcgtgtcggtatgccgtgggaacgagcgctggcctgggcactgatggccatcatcagtttctggggggtagggacgctgctgtcgtttgcggtcaaccggtcacaaatagtttctgttgcacagcaggctcatgctctggtggagcacacttctgtatcggattaccaactgacggccctgcatgctctgcgtaatgatgccggtcgtctgctgcaccatattcaggacggcgcgccatggtatcagcgctttggtctggaccatgaacagcagttgcttgacgcaatgctgccctggtacggggtggcgaacaaccgtctgatacgtgacccggcaaatgaagcgcttaagcagaagctcattgcgctggtcaattcggcacccaacagcgaccagcggacacagatggcgaaaccgggttatgaccagctgaaagcctggctgatgatgtcccgtccggataaagctgatggtgcattctacgcgcgaaccatgaaaaccgtgcagccgacgcgtttaggcatctcagctggcctgtggcaaagcctgtcaccagatttgtgggctttctacatcaacgaactgccagcgcagtcacagtggaaaaccacaccggatgagcaactggtcagccagagccgccaggtgctgttgcagcaaattggacggcgcaacgcggaaagtacgctgtacgagaacatgctcaaatccgtgcgtcgtaacttcgccgatgtgtctctggaggacatgaccggcggtaccgatgcccgtcgcctgtttaccactgatgaggtggtgccgggcatgttcacccgtcaggcctgggagggaggtattcagcaggccatcgagaaagcggcaaactcccgccgcgatgaaattgactgggtgctgagcgacagccggaaagccgtctcctcagacctgtcgccggaagcactgaaagcacgtctgacggaacgctacttcaccgactttgccggtagctggctgagcttcctcaacagcctgcaacttaattcggcaaacaatattgctgacgtcactgaccagctgacgctgatgagtgatgttcgtcagtcacctctgattgccctgatgaacaccctcgcctggcaggggcagaccggccagaagagtgaaggcctgtcggactccatcatcaaatcggctaaagacctggtaggcgggaaggacaaaccggtaattgaccagtcagcctcaggcccgcagggcccactggatgaaacctttggaccgttgctggcacttatgggtaaaaacaaaggcagcaacgttatgtcggctgacaactcactgagcctgcaaacgtatcttacccgtatcacccgtgtgcgtctgcgtctgcaacaggtcgccagcgcctctgaccctcaggaaatgatgcagagcctggcgcagaccgtgttccagggtaaaagcgtggatctgaccgacacccagcagtacggcagcctgattgctgcaagcctgggcgaagagtggagtggttttggcagcaccatgtttgtgcagccactgacccaggcctgggaaactgtgcttcagccatcggcagcgagcctgaatgacaaatggagtcgctccgtggtggcgaactggcatacggcatttgacggacgtttcccattcgcgatcagcaagagtgattcctctctgccaatgctggctgagtttgtgcgtaaggacagcggacgcattgagcgcttcctgaccgcggaactcggcggtgtgctgcataaggagggcagccagtgggtgccggataaggttaatagccaggggctgagctttaatccagccttcctgcgggcgattaatcagctcagccagctatcggatatcttatttaccgacggcagtcagggcatcagttttgagctacaggcgcgtccggtaccgcaggtggtagaaacgcaactgactattgatggacaaaagctgcactacttcaaccagatggcagactggcagagcttccgttggcctggtgacacctacaagcccggaaccatgctgacatggaccaccgtcaatgcgggcgcacgtctgtttggtgattacagcggaacctggggctttattcgttggctggatgaaagtaagagagagcagctagaccgcagtcagtggatgatgagttttaccgccccggatggtcggaccctacagtgggtactgcgttcacaactgggcagtgggccgctggcgttactggcactgcggggttttacgctgccagatcaaatattcagcgtcgacagcgcggctatggcgcaggcgctgatgaccaacacagaaaatagtgacatggacggagtcgaataatggacgctttgctgaatctggttgttgcctgccaggcggatgaaaccttgctgcgacagcaggcgcagtcacgtatggaaagctggcagcgctggcttacccctatcagtgagatcaatcctacaggagaagacccgggttatgacgatgatttccagcgtatccgggaggaggtcaataaactttccggcattgataccgggctgatttgccagctggctgaaaaggtgctgaccacagaggccaaagatgtccgggttgctacttactattgttgggcgcgcttgcaccaggacggtgaaaccgggtttgctgaagggcttgagttactggcgggattactaacccagtatggaacacagctccatcctcagcgcgagcgaagccgtaaaccggcgctggagtggctcgcaggctctcgtctacttgacagcctgttactctggccagaagtggtacgcgacgatgcccagcgtacgaccggtgcgttgctgctcatccgagacagtcttgaaactgagccggaagcgtcacgtccagatctgagtgccctgtacagcgcgctgggatcccgcctgatgaaagccggtggcgtggatgcggtaataccccagaatgccagcagtcagacacgcccgcagtcggcatctcacacggcagaacaggacgcgccagtgctgagccgcatcacgtccggtcaggatttgctggctcaggcccgaaccctaacgggatatttgcgtgagcaacctgatggctggcttgccgcacaccggctgatgaaaagtctgcgtcacgacacgctaagagcaatcccggcaccggatgccgaagggaaaacgcgcatcgaaccgccgcgggctgaccagcgtgcaatgcttaaacggctgtatttgcaacagagctggctggagatactggaacaagcggacagcactttctcgcgtggcgccaatcatctctggctggatttgcagtggtacatccatcaggccctgattaaatcaggccaggatgtgctggccgatatcattaccgctgacctgaaagggctgctgcggcgccttcctggacttgaaacgctggccttcaatgacggcacaccctttactgatgaggtcacgctgaactggataaaccagagcgtgctcgacgagatgtccaactggcgggatgagtctgtcagtgccttgagtgaaactggcaacgatattctggcccttgaaccggaagcactggagaaagctgacacggatggtctggatgccacactccactggctgcaaacgcgcccgggcaccgacaccacaaaagacaaatggttggtgcgcctgctgatggcacgtgtggcggagcagaagggtaggaatgaactggccctgcatctgctgggtgaacttgacggtgcagcacaggccatcaccctcactcagtggacaccggcgctgttgtttgaagtgaaatcgcgccgcctcaggctgctgcgtatgaaagccgcccgcagtgaaaccgataagtcacggcttcagccagagatggaccagcttctggcgggcctgattgcccttgacccggcaggctgtgcggtactttgcgggtaaagcgactgacatacctttaaaacacacatattcaggttcttatggacgacttaaccctgcgttattacgacgctgaaatgcgctacctgctggaagccggcgaagaatttgcccgcgctcaccctgaacaggcggcaatgctcaatctcgataaagcgggcgcgcgcgacccgtacgtggagcgactgttcgagggctttgcctttctgatgggccgcctgcgtgagaagcttgatgacgacctgcctgaactgactgaagggctggtcagtctgctatggccgcattacctgcgcactattccctcgatgtcggtggtggagttcactcctgtctggcgtgagatgaaagaaccgatgcgtattgccagaggtttcgaggtcaattcgcggccgatcggtgaaaaaggcacgcgttgtcgctacaccacaactaaagagataacccttcagccactggcgttggagcatgcccgcctgtcgactgatcctgacgggcgctctgtcatcagcctgcgcttcagttgtagccatcttgctgactggagccgtgtcgatctcagccagatcccgttctatttcaacgctgacgcaccgctggcctgcgctatgcatgaagcttttaccatgaatactgcgcgtctgtggctgcgcatgccgggcgacatggacagaaggccgatggacgggtatttcaccgcactggggtttggtgatgatgacaggctgtggccgaagggggacagcagtttcagcggttaccagttgctgctggagtacttcacctttcgcgagaaattcatgtttacggggctgcgcgggctggagagcgtggtctttccggctgagatcccgtggtttgaaatcgacgtggtgctggcggaacgctgggagcatgacttcagctttaccgaaaagcacctgcgcctgaattgcgtgccggtcattaacctgttcccgctggaatccgatccgctgacgctcaattctctgcaaaccgaatacatgctgcgcccgatgcgcgtgcaggatggccataccgagatatataccgtggattcggtgatgtcatcgagccagcacacctacgtgccgttttcgagcttccgtcataagggaggaatgatgcgtcatgaagcaccggaatattactaccacacccgcgtgcgccgcggtccgtccggcctgcataacacctggctcatccttggcggcgaagcatttgataatcataccgtcccggaagacgaaagcctgtcgctgacgctcaccggcaccaatggtcaactgccacgacgtgcgctgcaaagcaccgtgcttgatacggtgatgaaaaccacttcggtcagcattgccgtgcgcaacctgtgtgcgccgacgctgccttgttacccacctgcgcaggaccgttttcactggcgcgtactgagtcaccttggcagcggatttctgtcgatgatggataatgccgacgtgctgcgcggtaccctggcgctgtatgaatggaccgacagcgagatgaaccgtcgccgtctggaagctatcctcgaggtgaagcacagtgaaacggagcgctttgaacagggctacctggtccgtggcgtgcagattgaagtcacgctggacagcaatggctttgccggacgcggcgacatctgcttatttggcgagatgatgagccgattctttgcgctatacactgacatctacttgtttaaccgcctgattatcattctgcaaccgaccggagaacgcctggaatgggaagagaagcacaaccgccgcattcccggctgagcccacggctggaagccgacctgcatcgtattaacttttaccgtttatgccagttgctggagaagcgtaacccgggcaggccgctgatgggctcgaccagtcacccgggcgatgacccggtacgctttgccccgcatccgggcatgggatttccggccagtgagctgaaagccgtggagtatgatgaggatgatgacagccggccaccacttatccgcacgacctttatgggaatgtacggtgtcgactcacccctgccgatggcgtatctcgatgacatcgctcagcgtcgggaagggcatgacgcactacagggttttctggatattttcagccatcgcattctgacgcagttttaccgtatctggcgtaaatactcttatccggccacctttgaacccggtggtacggacagcatctcgcagtcactgctgggcctggtgggattgggtattcccggcacagcagaccacattgccacaccggtatcccgttttctggctctgctgggtgttctacagcaaccgggcaaaactcaggagggaatgcaggcgctggtgacgttgctggccccggataccaccgtgagggtcagtccatactgcctgcggccggtggaaattggtcagccgctgggcttttacggtgatgacgattttctgctggacggcaacacgccactgggtgacgaagcgatggatgcgggtagccaactgctggttgcgcttacaacggataatgaacaggaggcacagggctggaagccggacggtctgctgtatcaggattttctggtcatgctgcgggtatatcttggctggcgttttaaggcgaagatcaccctgaccacccggacccgactgctggctgttccgccacttggcgaaggccctctctggctcgggatgaacggcgtgctgggggctgatgagggggaacttaaagacgatatcccaccgacctttacgacggaactgggctattacaccggcctgaagctggcaataccacaacaaggaaaccgacgtgttacgtacaagtttgattaaatccgcaggctggttgcctgcactgctggcgttcagcctgacggggtgcgggatgacgcagggtatcaccgatggcaccaaatcggcatttaacgccgtgttctacaaaaaaattaagatgctgcacctggatttcacggcgcgtgaagcgctaaacaccgattcccgcgaaagtaactcactctccgagccggtggtagttcgtgtctatcagctgaaagaccgtaaaatcttcgataaaacggtttaccagcaactactgaaagatggcgaaactatcctgaaaaccgacctgatggcgacccgcgatgtggtcgtaaaaccgggcggtgatacaaatcttgatatgccaatggaagaagaaacgcagtttgtcgcggtagtcggcctgtttcgtcacccggacctggtcaacaatacctggaagcaggttctaaaacgtgaagatctcgatccggataagccgcgcattctggaggccgggaataaccacctgacgttacagccattgaaggatgactgatgcctaagggacataatacgccatcgctgtatgaaatgctgagcggtaatttctcaggtggcctgagcctcaaccaggtcagcgaacagaatcaggtgattttatcagtactcgataacatgcagcgcatcctcaactgccgcgccggtacgctggctcacttgccggactacggcctgccggatatgacaaaaatcctccagggaatgcccggtaccgcccatcagctgattaccacactgtcggccatattgctgaaatatgagccgcgcctgagccggattaacgtggtgatgcaggaacagattcagcccggtgaactccgctacgccattgatgcggagctgaagggggtcgggctggtgcgctacggcacggaatttatgcccgagggcagggtattaatccgtcatctgaaacaacagcaatacctcgatgcacgagccgccatctagttattactcaggttaaaacagttatgacaataaattctgaacgccaacttaaaaccggcggggatccgcgcacgcttgcggattacgctgccttgcgcgaagaaatgaacaagctcacccatccggcacgcccggatgttaactggcaacacgcggaaacgctctgtctgtcactgttcgagcataacggtgtggagctacaaacggctgcctggtatacgctcgcccgcacgcatctcgccggactctacggcatgaatgaagggctggggctactggctgcactggtcgtccgtcagtggggtagcctctggccacagcctgtccatgcgcgagttgaaatcctcagcgcactgagcaaacgcctgcaacaggtggtgagaacgctgacgttgacgtatgccgatttagggcagctttatcaggctgaggagaatctgaacgctctgagtgacatgttgcagcgcctcgaacttaagcatgctgctcagcttgatgccctgcgcacgatgatgcagaacgcagcagtgcgtctggaaaacagtgataatacgggcgtgagtctgccgggtaacacgatgggggccgcggaacttgatctcaccgaaccgacagagcgttgtaaatgggtttatgtggttcagcccgagccgttgccgaataaagagcctcctgtacccgtgaagcagtggaagccatttgctgcgggtatgttgttcatgctggtggcagccagcattgtcgcagtgggatggcagacgatgcatgcgccagattcggcgcaaatgcagctggctgcgactctggctcctttacctgaaggactctctacagnnnnnnnnnnnnnnnnnnnnnnnnnnnnnnnnnnnnnnnnnnnnnnnnnnnnnnnnnnnnnnnnnnnnnnnnnnnnnnnnnnnnnnnnnnnnnnnnnnnnnnnnnnnnnnnnnnnnnnnnnnnnnnnnnnnnnnnnnnnnnnnnnnnnnnnnnnnnnnnnnnnnnnnnnnnnnnnnnnnnnnnnnnnnnnnnnnnnnnnnnnnnnnnnnnnnnnnnnnnnnnnnnnnnnnnnnnnnnnnnnnnnnnnnnnnnnnnnnnnnnnnnnnnnnnnnnnnnnnnnnnnnnnnnnnnnnnnnnnnnnnnnnnnnnnnnnnnnnnnnnnnnnnnnnnnnnnaggactctctacagcacagttgcaggcgctgcaacaaacgtcaccgccacctgaaccggggatcagcaagacacagcagctgttagcgcagcttttacacctgaaaccagactgggcagtaagctacggcgaccgtctggtgcagcaggcgctgacgctgtggccagaagaggccaaacccctggcacaacagtggcacaagcaaattagcgtttccggacttgcagagtcagagctgaatggctggcatcagggaatgacgcagttacagcagttgacgaacaggctaaacgcgctggatgaacagaaggggaagtacatgacggtcagcgaactgaaatcagccgtgtttgccatgtcgcagtccttcagccataccgttccgcttgaggagcggcttcgtctgctttccattttacctgccgggcaacccctgtcagcagcgcagctaaaccagaccgaacagcatcttcagcagttgattgccagctatgccctgctgaagcaccaaaaagaataatgagactggcgaaaaacacggagttgacatgtcagcaagagagcgtttttttaagaaagtgcagcggagtatcggggacaaaccgatctatgttaatacggctgaggccgaagtcagggctttttgtgagcggatggaagaccttgcgcagcaaatcattacatggtttgaaggttctggtattgaaatatttttatctaaaaaacatatcaccgatttaagtacggttggctacagcctcagtagcggtatatgtcgttataccattacgacgatcattttgcaaaatggggatcgcagcgtcaccattatgccagaacaggtgatcagggggccggagaaggggtgtgtgacgatgagtattaatgtccccgatagtctgtcgggggcgaggatattccatttaagcatggcgcctgaaacaggctggtatattcgtcgcgggcatcaaagtgcaaaagagaatatcctcatgacagaggactgttttttccagactatcgactgtctggcctgaacgtaagccaccctaacgggagggacgcgtattaactacgttaacttattaagcaccactaaacaacggcgtcctacagtacccctccttaaatatataattaccgttattgaaggggtatcagcaacccaacgacaagccagatatttagcataaaacatgctttttatccgccttaagtaaaactgcgcaaatcaaactgcaaaacaacaaaccagcgacgaacgtgaggacaaatttctatggcaatgctataacccttaatgccaaccaaaatataatgtcccaggaaaacgtatgctaagaaatattagtgtcagaacgttcattgtgtatttccttttatgtgtatttttggtaagtgatggagttatagcgctattttcacggaattcttcgctttttattgcagtcataattgtacaattcatcgccttatttttactctgggcgtacatgaccaaatatcttgtgacgccgatcaatacggtgaaaaaagtattgaagaagtaacgtcaggcaaacttggcgtgtcgatacctgaatttggcaacaactgtgcgggacgactgatcccggggattaacagtctctccagcaacattgcaacgctggtccgtgagatccgcgcctcctcgcaaaccgcgatgaccctgtcagatcaactctcttcacgcagcgcgcagctttccgtcaaaacagaacagcagtcagcttcgctggtgcaaacggcagccagcatggaagagatggctgcaagtacaaaaaataatgccgacaatacccgtttagccagcgagcaggcgaatatcgcgacgttacaggcgcgtaaaggcggagaattaatggggcaggttgcgaacaatatgcagtcgattaccgactgcgcccagcaaatgacagagattatctcgctgattgacggtatcgcttttcagaccaatattctggcacttaacgccgccgttgaagcggcacgagcgggcgaccatggtaaagggttttctgtggtcgcgggtgaagtgagaagccttgcgcatcgtagcgccgaagcggcaaaaaatattaagtcattgattgaagttaccagccataacgtgacgcagggcgttaacgtggtctctgaagccgaaaaaaacatgcatgacattgttaccggttcgggcaatgtgagcagactgatggatgaaatatccgcctcaacatcagaacaggaaaaaggtatttcacaaattacgcaggcattgtcagagcttgaacgcgtaacgcagagcaacgtgtcgatggttgaggaactcaatgggtcgtcagatgtgctgcgcaatcaggtgattgagctccagacacgaacacgtaatttccgtctggaaaatgagttccagactgataatgcattaaaaagccgcgaatgggcggtgaattcctgaacgtattcaggacgatgcctcacataattattgcttaaccctcggcgaaagctagactgacaccgaaagagataaaacggtggaggcgctgtggagagcattaaagggtctgaggttaacgtacctgacgcagtttttgcatgggtgtttgatggacaaggcggcgcaaggccgcttgaagatcaggatcacatcgacagcgaacatccatgctggctgcacctcaactacacgcacccggacagcgccgagtggctcgcgtccacgccgctattgcccaacaacgttcgggatgcgctggcgggagaaagtctcagaccccgcgtcagccggatgggtgaggggacgttaattacgctgcgttgtataaacggcagtacggatgagcgtccggatcagctggtggcaatgcgtgtttatatggatgaacggctgattgtttccacccgccagagaaaagtgctggcgctggatgacgtcattaacgatctgaaagagggcaccggacctacggattgcggcagctggctggtggatgtgtgtgatgcgctgaccgatcatgccagcgagtttatagaagaacttcacgataaaatcatcgatctggaagataacctgctcgatcagcaaatccccccacgtggttttctggcgctgctgcgtaagcagctcatcgtgatgcgccgctatatgacccctcagcgcgacgtttatgcgcggctggccagcgaacgcatgagctggatgaacgacgannnnnnnnnnnnnnnnnnnnnnnnnnnnnnnnnnnnnnnnnnnnnnnnnnnnnnnnnnnnnnnnnnnnnnnnnnnnnnnnnnnnnnnnnnnnnnnnnnnnnnnnnnnnnnnnnnnnnnnnnnnnnnnnnnnnnnnnnnnnnnnnnnnnnnnnnnnnnnnnnnnnnnnnnnnnnnnnnnnnnnnnnnnnnnnnnnnnnnnnnnnnnnnnnnnnnnnnnnnnnnnnnnnnnnnnnnnnnnnnnnnnnnnnnnnnnnnnnnnnnnnnnnnnnnnnnnnnnnnnnnnnnnnnnnnnnnnnnnnnnnnnnnnnnnnnnnnnnnnnnnnnnnnnnnnnnnnnnnnnnnnnnnnnnnnnnnnnnnnnnnnnnnnnnnnnnnnnnnnnnnnnnnnnnnnnnnnnnnnnnnnnnnnnnnnnnnnnnnnnnnnnnnnnnnnnnnnnnnnnnnnnnnnnnnnnnnnnnnnnnnnnnnnnnnnnnnnnnnnnnnnnnnnnnnnnnnnnnnnnnnnnnnnnnnnnnnnnnnnnnnnnnnnnnnnnnnnnnnnnnnnnnnnnnnnnnnnnnnnnngatgaacgacgatcaacgccgcagaatgcaggatatcgctgaccggctcggacgtggactggacgagattgactcatgtattgccagaacggcagtcatggcggatgagatagcccaggtgatgcaggagtcgttagccaggagaacgtacaccatgtcgctgatggcgatggtctttttaccgagtaccttcctgacggggttgtttggcgtaaacctcggagggatccccggcggtgaatatcactatggcttcaccacgttttgcgtcatgttagtggttttgattgggggtgttgcatggtggttgcatcgtagtaaatggctgtaaatttacgcttttctgaggcagagtcggcttcaaaacgacattttaattgagcgaagtcaataaactccgaccatgttaggtgcaatattactcccgcaggtgaatgcaacgtcaagcgatgggcgttgcgctccatattgtcttacttcctttttttgaattactgcatagcacaattgattcgtacgacgccgacttcatagtcggctttttttttgcctcctgtttatctgcgtctaccctttaggggtcagcaccctaatctggaggaaaagatgagtatgctacttgccctgcaacgcctcaacacctggcagtccgatccggtgcccaccgatccgacgccgatacccgatcctgtcccacgtccgcagccgatgccggatccgccgcccgatgaagaaccgattaaattgtcgcatcgttagcgcagatctgcgaggatacgcgccatctgactgcaatcattcccacgagagtatattgtgaccgctttttccacgctgaacgttctgcctgaagcccaactgactaacctgaatgagttgggctacctcactatgacccctgtccaggccgccgcgctgccggctatccttgaaggccgtgacgtgcgcgtgcaggcgaaaaccggcagtggaaaaacggctgcatttgggctaggcctgttacaacacattgatgcaaccctgtttcagacccagtccctgatactctgcccgacgcgcgagctggccgatcaggtcgcgggtgagctgcgtcgtctggcgcgttttttgcctaacactaaaattttaacgctctgcggggggcaaccgttcggtgcgcagcgcgattcccttcagcacgcgccgcatatcattgtggcaacgccgggccgtctgctcgatcacctacaaaaaggcactgtttcactcgatgcactgcaaacgctggtgatggatgaagctgaccgcatgctggatatgggcttcagcgatgcgattgacgaagtgatccgctttgccccagccacacgccagacgctgctcttttctgccacctggccagaggcgattgcggcgatcagcgggcgcgtgcagaagaacccgctgaccattgaaatcgatactgtcgatgcgttaccggcgattgagcagcagttcttcgagacatcgcagcagggcaaaattccactgctacaaaaattgctgagccaacaccagccagcgtcctgcgtggtgttctgtaataccaaaaaagattgtcaggcggtgtgcgatgctctgaatgatgccggacagagcgcattatcgctgcatggcgatctggaacagcgcgatcgcgatcagacgctggtgcgtttcgctaacggcagcgctcgcgtgctggttgcaacggatgtagcggcccgtggcctggatattaaatcgcttgagctggtggtgaatttcgaactggcatgggatccggaagtgcatgtccaccgcatcgggcgtaccgcgcgcgcaggtaacagtggtctcgccatcagcttctgcgcacctgaagaggcgcagcgcgccaatattcttgcggaaatgctgcaactaaaactcaactgggtgaatgccccaggtaatatcagcatcgctccgctggcggcggagatggccaccctgtgcatcgacggcggtaaaaaggccaaaaatgcgtcccggtgacgttctcggggcgttaactggggatatcggtctcgacggggcagatattggcaagatcacggtccatcctgcgcatgtctacgtagcggttcgccagtcggttgcgcagaaggcctggaaacagttgcagggcgggaagattaaagggaagacctgccgcgttcgactgctgaaataagcttaaaacgcgtctcagaaacgatatctgagacgctaccaggttacttgacttctaccacgttcaggcgcagttcatcgaattgcgcatcctcttcctctggctgccagccagcaggctgcatcgggatctcttcgcggtcaaacgccagatccccgccattcaccacctctgaaccgtggttaatccctttgaaatcgaacagttcaacgtcggccaggtgcgaaggcaccacgttctgcatggcgctgaacatggtttcgatgcggcccggatagcgtttatcccagtcacgcagcatgtcgccaatgacctgacgttgcaggttcggctgtgagccgcacagattgcatgggatgatagggaaggctttggcctgggagaaacgctcaatgtctttctcgcggcagtaggcgagcgggcggatcacgatgtgtttgccgtcgtcgctcatcagcttcggtggcattcctttcattttgccgccgtagaacatattcagaaacagcgtttgcagaatgtcgtcccggtgatgaccaagcgcaatcttggtggcgcccagttcggttgcggtgcggtacagaatgccgcgacgcaaacgtgagcagagcgaacaggtcgttttgccctctgggatcttctctttaacaatgccgtaggtattctcttctacgattttgtactcaacgcccaggttctcaaggtactccggcaggatatgctccgggaagcccggctgtttctgatcgaggttaaccgcgaccagggaaaagttcaccggtgcgctttgctgtagattgcgcaggatctccagcatggtgtagctgtctttaccgcccgacaggcagaccatgatgcgatcgccttcttcaatcatgttgaagtctgcaatggcttcgcccacgttacggcgcagtcgcttttgcagtttattcaggttgtactgttctttcttgttaatttcttgattttgttgcatctattcgttactcagatctcaaatggggcacagggtgaggaaaacgatttcaaagcgtcagcttcgtgttcatctcttctatccatgtagcatagatttcatacaccatctgcgcatgtacgtgccccatctggttagcgataaaagacgggtttgcggctaccggtaaaaaccagcatgcgaaagtgtgtcgtgtatggtacggattgcagcgccgaatgccagcacgatttacaaatgagctccacaggagaagtttggttaagactgaagggttgtctacacttacagcttacgcagtaaaaacggaggtgaaaatgactgaccgtcccgttaatggtgaccatcctgattataatcccagcccggataacccggacaaggatggaaaaaaaccgaaagatgatcctggctcagcgcctgaatcaggcgataaagatccagagtaatgacctgccgccttttcgaaggcggtttttacacccattcggcctctctacgcgcaccgctattcatgttgtcctcatcaacgttgtctgataaccgctcggaatccctcctgttttgcctggcgaacagctgagataaagcacggatctcattcccgcgtaccagcgcgttttacatttctcctgctacgcttttgagggggacaagggagcgcttctatgaaaaataaagacgagcagacaggattagttgggctggcgattggtgccgccgttatcgggctggtttcatcccagaagatcatcaaccgtgaaagtattgtcgctgagctggtaaggctcggcaggcagaagggggatggtgtcgaagatgaggtctttttaaaagcggctgagttagtgagaaaaggagtataacgatgactgacattcgtcatgcacagtgtcattgtggggcggtgaaatttacggttgagctgtcggacggcctgaataccgctcgtcgatgtagttgctcgttttgcaggatgcgtggggcggtagtggtttcagcgcctttgacgggcattaaggtgacgcagggcgcggacacgctcacagagtaccgtttcaacaccggcacggcgcgccatttcttctgttcgatttgcggtatttacacgttccatcaacgacgttccaatcccaatgaatatggtgtgaatgtcgcctgtctggaaaatgtcacgccattcgacttcccggaagtggtggtaatggatggagttaatcaccctatggatggcgacagcggagtatttggctatctctctttccgcaaagaacaggcgaaacagcgataaaaattagcccgcagatcgctgcgggctaacgggattagaactggtaaaccagacctaacgctacaatgtcatccgtaccgatgccattgtttttgtagaacgaatcatcttcatccagcaggttgattttataatcaacataggtggacatgtttttgttgaaatagtaggtagcaccgacgtcagcgtatttcaccagatctttatcgtcctggccattgcccaggtctttacctttggactgtaaataggaaatagccggacgcagaccgaaatcgaactgatattgtgcggtgacttcgaagttctgggttttgtttgcaataccgccgccatcttggctatcggttgaaccataaggggtcatattgcgggtttcggaatacattgccgccaggtaaatattgttagcgtcatatttcaggccagcagtccatgcatccgccttatcgccacctgcatactgagatgctgcgccagtgccagcactaacctgatcgttggtacggtcagatgacgtatatgccgcgcctgcgctgaagcccatgccaaagtcataggtggtggagataccgaagccatcaccgttttgattacgaatgttgttatctgaacggttattagtgccttcctgagagcagccatactcgtcacagttgctgccttcattattaccctgatactgcaccgcgaagttaagaccctgcaccagaccaaagaagtcggtgttacggtaggtagccacgccgtttgcacgaccggtcataaagttatcggcataagtataagagtcgccaccaaattctggcagcatatcggtccagccttcaacgtcgtacaggacgccatagttacggccgtaatcgaaggagccgtaatcgcccaccttcacacccgcgaaggccagacgcgtccaggactgattgtcagaaccttcggtgttgtttgcctgaatgttgtattcccattgtgcgaagccggtcatcatgtcgttgatttgggtttcacctttgaagcccagtcgcatataggtttgatcgccatctttagacgcgtcgtcagagaaataatgcagaccatctactttgccatacagatccagtttattgccgtctttattataaatttcagctgcgtgagcggcgccagccattaacaaagcggggatcatcagtgccagtacttttctttgcattttgattattcctttgcagttatttttttattacttcgtgaactttccgggctggaaagctgtcccatgctaaatcactctgacggtggatgaataaaatataattgttacgggttaagtaaaatctaaaccaaatgatgcggtagaaataacgattgatgccatgaatgaattattataatcaatacaaaataaaaattattaattacgtggaaaacaaggtaaccttcacgccgttatatgcctttaagattttttcatccataattcacgtgaatattgttcagaacattgaggcaattttcaccgatcttctggattcgcccggtgcacgtgcatcgggctttttttggcaaaaaaatgcccggacatgccgggcatacaggttattcgctggtcgatttttcggctttccccgccagttgcgccaggaagtcataccgcttctgtagatccgctgccgcatccttccatagctgctctgccacttctggctgttgagcgttcagcctgcggaaacgctgctcctgaagtaaggtttcggcaagggcgtctgacggcggacgcgaatccagcgccagcggcaatttcccttcatcggcacggcgcgggtcgaagcggtacagtggccagaagccggttgcggtgagctgacgcatctggtcgtggctgagcgccagatcgtagccatgctcctcacacggactgtaggcgataatcagcgacggccctggatacgcttccgcttcctgaatggctttcaccgtctggttgagctgcgcccccagcgaaatctgcgcgacgtagacgtgtccatacatcatcatgctgacgcccaaatctttacgcgccttgcgcttgccgtgctcaccaaatttcgtgaccgcccccaatggcgttgctttcgaggcctgtccgccggtgttggaatagcactgagtatcaagcaccagaatattgacgttttcggtcaggctcaggacatggtcaagaccaccgaaaccaatatcgtaggcccacccgtcgccgccgatcagccagacagatttttcaaccagcgcgtcagcatcagtgaggagttgttcagccccttcaacaccctgaagcgcgttgcgcagttcagcaacctgcgcgcgacgaacgtcaggtgtggcctccgcatgcagggcattattcagttctgccgggatcttatcggcaaactgtgcgagcagacgcattacgcgggcgcggtgctgatcgaccgtcagacggaatcccagaccaaattctgcgttgtcctcgaaaagcgagtttgcccacgccgggccgcgaccgttcgcgtcggtggtgtatggcgtggacggcaggttacccccgtagatcgacgagcagcccgtcgcgttggcaatcagcattcggtcaccgtaaagctgagtgagcagtttgatatacggtgtttcgccgcagccggagcacgccccggagtactcgaagagcggggtgatgagctgcgaggtacgaatgtcaatgcgttccagcttgttgcgatcgatttcgggcaggtcgaggaagaaatcataattcactttctcttcttcaacatgttcaagacgcgacatcatattgatggctttgattgacgggtcctgacgatctttcgccgggcacacctcgacgcacaggttacagccggtacagtcttccggcgccacctgtaggacatatttctgaccacgcatatcgcgggattttacatccagcgcgtgcagactttccggtgcgccatctaacgcttctggcgacaccactttggcgcgaatggccgagtgagggcaggccgccacgcagtggttgcattgggtgcacagctcttctttccagatagggatcgcttcggcaatgttgcgtttttcccagcgggtcgtgcccatcggccaggtgccgtcaggcggaagcgcagagacgggaagggtgtcgcccagtccggcaagcatcgccgccgtgacggttttgacgaaatccggggcggcgtcagacaccactggcggccggttcggactgctggcattgaccggctgcaacggcaccgcgaacagcgattcgcgggccagcgccagcgcctgccagttgcgctcaaccagttcctgacctttgctgctgtagctttttgcgatcgccccctgaagctccatcagcgcgctgtcgcccggcagaatattggtcaggtggaagaacgccatctgcataaccgtattgatgcgcgccgccaggccgcattcgcgggcgatcttcgcggcgttaatgacatacaggcgcgcctgtttctggttaagcaccgcctgcacttcctggggcaggcgtgcccagacctcgtcggcgctgtaaggggtgttgatcaggaaaataccgccgggcttcaggcgctcggccatctgatatttatcaatgaactggagctggtgacagccaacaaaatccgcctgagaaatcaggtatgccgagcggatcgggtgttcgctgacgcgcagatgggagacggtcagtccgcccgcttttttggagtcgtagacgaaatatccttgcgcataccacggcgtagagttgccgataattttgatgttgttcttggtcgccgagacgctgccgtcgctacccagaccgtagaacagcgcttccagtttcgcattcgagggcagggtgttttccggcaaggggagagaaaggttagtcacgtcatcataaatgccgaccgtaaagcgcggcttcggttttgcctcgcggagttcagcaaataccgccaggacgcactccggtccgaactctttggaagacaatccataacgcccgccaatgacgcgcggcagcgtttcgcgctcaccgcggttaaacgcctcagccagagcggtcatcacatccagataaagtggctcagcctgtgcgccaggctctttggtgcggtccagtaccgccactgcacgcgcgctatccggcagggctgcgagcaggtgtttcgctgagaagggacggtagaggcgaactttgagcacgccaactttttcaccacgcgtcaatagctcatccaaccacctcttcacaggtgccaatggcggagcccatcaggacgatcacccgctcggcctgcggatgaccgtaatattcaaacggcttatattcgcggcccgtcgcagcggcaaaatcgtccatcgcctgttcaacgtgctcatagaccgcgttgtaccacgggtttgtcgcctcgcgggactggaaataggtatccgggttcgcagaggtaccccggatcaccggatgttccggattgagggcgcgagcgcgatgcgcatcgatgtcagcctgcggcagcagattcagaatggtgtcgtccggcagcggaacaattttattgatctcgtgggacgtgcgaaaaccatcgaagaaatgaataaatggcactcggcttttcagcgtggcgatatgcgaaatcagcgcgaagtcctgcgcttcctgcacgctgctggcgcagagcatagcgcagccggtctgacgcacggccatcacatctgagtggtcgccaaaaatagagagagcgtgagtggctacggtgcgtgcggcaacgtgcaacacaaacggcgttaattgccctgccagcttgtaaagcgtggggatcatcaacagcagcccctgagacgacgtgaacgaggtcgacagggcaccggtctgcaacgcaccatgcacggtggcaatggcaccggcttcggactgcatctctacaacccgcgggacatcgccccagacgttttttatcccattaccagcccaggcgtcagcctgttcagccatcgtggagctgggagtgatggggtagatggcgatcacttcgctggtacgaaacgcaacagacgcgactgcaccattgccgtcaatagtttgcataggacaacacccttacattgcgcaaaaagaggggcctgaaaaacgacgacagaccctgaatattatctgtgtattttagcaaagctcaggttttacgattttcgcttttgtgtccttggtatgcgctgtatcaatgactcgatggctactcgcgttaaaaaattgcgagaaattgttaccagggcgcataaatacgcacatccgctctcgacgatgcggcgcgtgatgcctattatgcataggtttcgcgttaattatggggaggaaggtatgcgttcagcattttgggtcggatgtgccgcgttactgttgtcggcatgcagcaatgaacctgtacagcaggcgatagcggcacacgttacgccaggtatgcgagcggcgatgtccagttcaggtcaggccaactgcgcaatgatcggcggttcactctccgttgcccgtcagctcgatggctccgccatcggcatgtgcgcattgccaaatggcaaacgctgtagtgagcagtcgcttgccgtaggttcgtgcggaagctactgagttattcaactcgcttaaacatcaatgtcttattggctgtcgccagggttaactggtcttcggtcaggtctacctgtgcgcctgtgcgtagcatatcggcgatggtctgatccagttcatttagctgcggctcggtgcagagtttccgcgtcattgccagcgttttgaccgtcaactctccttcggacagtttcccctggccgttgaagccgttgcacattgtgccggagacgacaatgttgttaatcaggctgatattgggttgcgcactgaagcgaatttcaggctgggttttcccgcctttaaccgctttgccatccacattttccagaacgaaacgatgattctctagctgttcggtctgaacggaggctttaccaggattaacgcatccagccagtgcgaggctgattaaacttactgccgcgagctttttcattttttttctcaaactatcaataccgtaaatattttttcagtgtaaccataccctcctgggtgttaatggggtttatctgaaagtgcgcgaagggaccgggcggcggcgcacccggtcagtgagttagtgcgatttaaatccggctgcggccatcagcattttaaagagcatacttacgcaggccagcgccagaacgctgccgccccagatgatggcaagccacatcaaacgtttccatacaggttgttgcatcagtgataaccctccccatgctgtacttttccgcgaaaaacgtaataactccagaaggtgtagaccagaatcacgggaatgatcaacagtgcacccactaacataaagccctggctttggactggcgcagcggcctgccacagggtaatgtccggcgggataatatgcggccagatgctgatcccaagcccgctaaagccaagaaaaaccagccctaatgtcataataaacggcagagtatggctcgcaggatcgttcaggcagcgccactggcacagactcaggatcgcaaccagcgcaggcacgggcagcagataaaacagattcggcagcgtaaaccagcgcgcagcaatagctggttgggcgagaggggtccagatactgattactgcaatgaataccagaagcaggagcagaagcactttcgatacctgacgcatccgctgttgcagggcattttcgcttttcattaccagccacgttgaacctagcagcgcgtaagccactacaagacccgcaccgcagaaaaaattgaacgcggtaaaccagtcaaacggaccaccgctgtaagcgcgaccagtgacgctgaacccatggatgaccgcgccgacggtgatgccctggctgaaggtcgccacaattgatccaccaataaaggccttatcccagaacgggcggtgcgccggagtggccttgaagcgaaattcgaaggcgacgccacgaaatataagcccgatcagcattattgtcagtggaatggttagcgcgtcgatgataaccgcataggcgagaggaaaggcgccaaacagggccgcaccgccaagcaccagccaggtttcgttgccatcccagacgggagccacgctattgaccatcacgtcgcggtcgtccgcattcggcgttgccggaaacaggatgcctatccccaaatcaaaaccgtccatcacgatatacatcaacgtggcgaaaacgataatcacgaaccagataatggaaagatcgatacccattacggttactccttaaattcagtggtgacggcagaaagcggacgagcagggcggccatcggattcagtcgcgaaggattcatggggctgcggcccttttttaatcagacgcaccatatagctgtaacccacgccgaataccgcggtataaaccacgaagaaggccagcaaactgacgctcatgtgcagatcgccatgcgcggaaaccgcatcctttgtacgctgtagaccatagacgacccagggctggcggccgacctccgttgttacccatccggcgaggatcgcgatcagcccggacggccccatcagcagggcaaaccacaggaaggaacgtgaggtataaaggcgctgtttataacgcagccagattgccgtcacgcccaggagcagcatcaacattcccaggccggccatgatgcggaaagaccagaagacaatggtggcgttcgggcgatcttcttttgggaactccttcaatgccggaacctgtttatcgagactgtgggtcaggatcaggctgccgagagcgggaatttccaggccaaaacgggtccgttcctgctccatatccggccagccaaatagcagcagtggggtaggctcacccggcggattctcccagtggccttcaatggcggctattttcgctggctggtgttttaaggtattaagcccgtgcatatcccccaccagcgcctggacgggggccacgatcaacgtcatccacaacgccatggagaacatggtgcgaatagcgggcgtattgtttccgcgcagcaaatgccaggccgcggaagcaccgacaaacagcgcgctgctgagaaatgccgctatcgacatgtgcagaaggcggtaagggaaggaggggttaaacaccacggcaaaccagtccaccggaacgacctgaccgttgatgatttcatacccttgcggtgtctgcatccagctgtttgacgagaggatccagaacgtagacatgagggtccccagtgcgaccatgcaggtcgaaaagaagtgcagccccggcccgaccttattccagccaaacaacattactccgagaaatcccgcctcaaggaagaacgcggtaagcacttcataggtcagcagggggccggtaatactgcccgcgaactgggaaaacccactccagttagtgccaaactgataagccatcaccaggccagagaccacgcccatcccaaagttgacggcgaagatcttcgaccagaaatggtacagcgagcgccagacgggattttttgttttcaaccacagcccttccagcacggcgagatagctcgccaggccaatggttatcgccggaaaaataatatgaaaggatacggtaaaggcgaactgtattcgcgcaagatgaaacgcatctaaaccaaacatgcactgcctcaatgttaaacggtgtactgttatgatagagaggcggcaagtgagatatcagaagcagaaatcgataatttatctataacagttgtgggaaaagctgaactttatctggctgatataggtaacaaggaagaataaaaaatttctttttatgatttttacgcattaaacaggttgctttgtcgccagcaacatgcgttaatggatttctggttttgaatccaaataaatatctgacgtagttttataaagcagttctcatcacgttgtgccnnnnnnnnnnnnnnnnnnnnnnnnnnnnnnnnnnnnnnnnnnnnnnnnnnnnnnnnnnnnnnnnnnnnnnnnnnnnnnnnnnnnnnnnnnnnnnnnnnnnnnnnnnnnnnnnnnnnnnnnnnnnnnnnnnnnnnnnnnnnnnnnnnnnnnnnnnnnnnnnnnnnnnnnnnnnnnnnnnnnnnnnnnnnnnnnnnnnnnnnnnnnnnnnnnnnnnnnnnnnnnnnnnnnnnnnnnnnnnnnnnnnnnnnnnnnnnnnnnnnnnnnnnnnnnnnnnnnnnnnnnnnnnnnnnnnnnnnnnnnnnnnnnnnnnnnnnnnnnnnnnnnnnnnnnnnnnnnnnnnnnnnnnnnnnnnnnnnnnnnnnnnnnnnnnnnnnnnnnnnnnnnnnnnnnnnnnnnnnnnnnnnnnnnnnnnnncctgatcggctcatgagtaatttacgtttttacgtttacaggagaatcctatgacttcttatatccatttccgctgcccatgccgtcatggctcgcagtaccgcacctcagcttttgatgtgtctgacaaaaatccgttcggcgcgaaatgcattttctgcaaatcgtcgatgatcacgctcgaccacctggccgcagcgcgttctgctcagaatcacattacagagtaccgcaagtaatctgccgcgtttcctataacagttagcaaaatcttctctttttctcctgctgatatacactgtcagcaataaggagaatctgatgaaaaaataccagcgtctggcgcaacaaattatctcgcagattgagcttggcgtatggttgccgggcgataagctgccttctctgcgagagcaggtggcaagcagcggcatgagttttatgaccgtgggccacgcgtatcagatgctggaaagtcaggggcgcattgttgccagaccgcagtcaggctattacgttgccgcccgcccgatcacacaccagcctgcaccgcccgcgcaggtgatgcgcgatgaagtggtcgacatcaacacctatattttcgacgtgctacaggccagccgcgacccctccgttgtcccttttgcctcggcgtttcccgatccgcgccttttcccgcttcagcaactcaaccgatcgctggctaacgtcagcaaaacggctaccgccatgagcgtgatcgaaaacctgccgccgggtaacgtcgacttacgtcatgccattgcccgtcgctacgctcagcagggaatgaatatctccccggatgaaattgtgatcaccgcgggcgcgcttgaggcgcttaacctcagtttgcaggctgtgactgaaccaggggactgggttatcgttgaaaacccctgtttttatggcgcactccaggcgcttgaacgtctgaaactgaaagcgctgtcggttgccactgacgtgcgtgagggcatcgatctcagtgcccttgagcaggcgttaaatgattatccggtgaaagcctgctggctgatgaccaacagtcagaacccgctcggcttcacgctgagtgcagagaagaaagctcagctggtggccttactcacccggcataacgtcacgctgattgaagacgatgtttacagcgaactctactttggccgcgaaaagccgcttccggcaaaggcctgggataagcaggatatgacgttgcactgctcctcattctccaagtgtctggtggccggtttccgtattggctgggtggcggcgggaaaacatgcgcgccgtattcagcagttgcagctgatgagtacgttgtccaccagctctcccatgcaactggcgctggtggattacctggcgaccaaacgttacgacgcccaccttcgtcgcctgcgacgcacgcttgctgaacgcaaacagcaggcctggcaatcgcttttgcgtcatatgcctgctggtgtcaaaatccatcacaacgacagcggctattttttatggctggaactgcctgaacagctggatgcggggcggttgagcgagaaggcgttaacccatcaaatcagcattgcgcccggcaagatgttttccacctccaatatctggacaccgtttttccgtttcaatacctcatggggctggggcgagcgggaggagcaggcggtcgtccagctggcggggttaatccgcgaaatgatgctgcacccagtcacaccttgatgaaaattcctgaagcgacatgacgcgcggtctacctttagtaagggagcgcggattggtaacgtgacgttgtcacgtttctgcccgccagaacgtgtgctgacagcgaaaacaatgtcgatttcaacaggacgatgctatgcaaaatcaattgctgattaatggtgaactggtgaccggcgaaggtgagaagcaggcggtttataatcctgccacgggtgaagtgctgctggagattgctgaagcgtcggcagcacaggtggacgctgccgtccaggctgccgatcgcgcgttcacagagtggggacaaacnnnnnnnnnnnnnnnnnnnnnnnnnnnnnnnnnnnnnnnnnnnnnnnnnnnnnnnnnnnnnnnnnnnnnnnnnnnnnnnnnnnnnnnnnnnnnnnnnnnnnnnnnnnnnnnnnnnnnnnnnnnnnnnnnnnnnnnnnnnnnnnnnnnnnnnnnnnnnnnnnnnnnnnnnnnnnnnnnnnnnnnnnnnnnnnnnnnnnnnnnnnnnnnnnnnnnnnnnnnnnnnnnnnnnnnnnnnnnnnnnnnnnnnnnnnnnnnnnnnnnnnnnnnnnnnnnnnnnnnnnnnnnnnnnnnnnnnnnnnnnnnnnnnnnnnnnnnnnnnnnnnnnnnnnnnnnnnnnnnnnnnnnnnnnnnnnnnnnnnnnnnnnnnnnnnnnnnnnnnnnnnnnnnnnnnnnnnnnnnnnnnnnnnnnnnnnnnnnnnnnnnnnnnnnnnnnnnnnnnnnnnnnnnnnnnnnnnnnnnnnnnnnnnnnnnnnnnnnnnnnnnnnnnnnnnnnnnnnnnnnnnnnnnnnnnnnnnnnnnnnnnnnnnnnnnnnnnnnnnnnnnnnnnnnnnnnnnnnnnnnnnnnnnnnnnnnnnnnnnnnnnnnnnnnnnnnnnnnnnnnnnnnnnnnnnnnnnnnnnnnnnnnnnnnnnnnnnnnnnnnnnnnnnnnnnnnnnnnnnnnnnnnnnnnnnnnnnnnnnnnnnnnnnnnnnnnnnnnnnnnnnnnnnnnnnnnnnnnnnnnnnnnnnnnnnnnnnnnnnnnnnnnnnnnnnnnnnnnnnnnnnnnnnnnnnnnnnnnnnnnnnnnnnnnnnnnnnnnnnnnnnnnnnnnnnnnnnnnnnnnnnnnnnnnnnnnnnnnnnnnnnnnnnnnnnnnnnnnnnnnnnnnnnnnnnnnnnnnnnnnnnnnnnnnnnnnnnnnnnnnnnnnnnnnnnnnnnnnnnnnnnnnnnnnnnnnnnnnnnnnnnnnnnnnnnnnnnnnnnnnnnnnnnnnnnnnnnnnnnnnnnnnnnnnnnnnnnnnnnnnnnnnnnnnnnnnnnnnnnnnnnnnnnnnnnnnnnnnnnnnnnnnnnnnnnnnnnnnnnnnnnnnnnnnnnnnnnnnnnnnnnnnnnnnnnnnnnnnnnnnnnnnnnnnnnnnnnnnnnnnnnnnnnnnnnnnnnnnnnnnnnnnnnnnnnnnnnnnnnnnnnnnnnnnnnnnnnnnnnnnnnnnnnnnnnnnnnnnnnnnnnnnnnnnnnnnnnnnnnnnnnnnnnnnnnnnnnnnnnnnnnnnnnnnnnnnnnnnnnnnnnnnnnnnnnnnnnnnnnnnnnnnnnnnnnnnnnnnnnnnnnnnnnnnnnnnnnnnnnnnnnnnnnnnnnnnnnnnnnnnnnnnnnnnnnnnnnnnnnnnnnnnnnnnnnnnnnnnnnnnnnnnnnnnnnnnnnnnnnnnnnnnnnnnnnnnnnnnnnnnnnnnnnnnnnnnnnnnnnnnnnnnnnnnnnnnnnnnnnnnnnnnnnnnncttaaagggacttaagcacctcaggttcaacaaagaattcaatattgaacagggtgtcgtcggtcatcacctcaatgtggtgccatctctctggcgggaaaacgccgaaacgacccgcttcaatgacgagctcgctgtcaggctcaggtgtaaattcatcagcatagcccagataacgcactgcgccacgcatcaccgacaggcgagggtaaacgcccggacgcgtgcccgtatccaggtggcgtttaaaaatgccggcgggggccgtttctttgttccagaaaggcgtggaacgggtgtgaatgcaactctgcggaatgcgtagcatgtttcctcccttaaaagcctgctggtattaaactgctttctgaggggatggatttatcaaaaagtgcatttaatatgcatcttatcaataataaccgtttttctttacccggcgttgttacacaaggtactcagttgttattatccttagtatttaagtggttatgatgtaacgaaaaaacttgatctgtgtcaacatatgacgcatattgcgtgcggttatttttcggctcaggtaaacagaatgacgttgtatcaaaagatgttggtgttctacgcaattatggcctccatctgcgcattaatcacctggttcctgtctaaagatcgtaaacgtattcgcctgttgagcgcattcctggtgggttccacctggccgatgagctttcctgttgccctgttgatctctcttttctgaagcacgcttccagaatcggcatccagacatagcattccatacattgaggctgtataaatatacagtccgtcatacatggagtgcttatgaacagtttctattcgcagcaagcaggctgcactgtgcgctggcaggatcttcccggtttcggtgacccggttgtgtttatccacgggttgggctgtgcatcgtcgtatgaatatcctcgtattgtctgtgatacccgtttcggggggcgcagagccattctgatcgatcttcccggtagcggttacagtgacaaacctgacaactaccgttatcgcacgagcgaacaggcgcaggtggtggttgaactgttaaaccatctcggcctggatagtctctggctgtatggtcatagcatgggggggagtatcgcgatcgaaacggcagcactgttaacgtcgcgcgttaagggcctgatagtatctgaacccaattttcatgcgggtggcgggatgttcagccgagcaattgcggctcaaacggaacaacattttctggctcagggctatgatgacatgctgcgggcggaaacgtcgccatgggctggaagccttcaaagtaatgccccctgggccgtctggcgcggcgcaacaagcctggtcgagggcgttaaacctgactgggcacacctgttcttgtcattgcgctgcccggtaatgttagtttttggtgagcgatccctgcctgatgacgattttattcgcctgcaacaaaacggcgttgctgtaaaaattatccctgatgcgggccattcaatgtcctgggaaaacccgtcagcgttggctcaggctttgtctggcttcataaacggctcatgaaggggtagcccgcattgctgcgggctgcaatgattaagacagcaaggcagacaaggctttccgcgcagcaggttgaacgtcatacgggcactgataatccatgttttcaatcgcgcgggtgtagagcgcaaccagccagtcataaacataggctgtcgccgcatggacaggctgctcgccaagtcgggtaagacggggagaagcgctgctcacaactggcgtcacaaaaattggctgacctttgcggatccggcttgcaggccgttcagaaacgggcgtcatttcatagccaagccagctaatgaaattgcctgtcgcggcatgcagctgcgcggcactgcttttatctttttctgcaatgcgttgcagttgcagcggcagatccagccggtagctggtaacgatcagcacatccgcaatctgctgtaatacctctgcgtccaggcccagacgggcagccgccgcgtcgttgcgactccactgacgaagatgattaacccacacgttatgggccagccgcgccttgtctttggtctgcaacgcgcctggattttcctgcgtctcttccgcaaacagatcgataacatcgttaaacaggccgttgacctgttcctcacgaggctggtgaacggtcagcagcgtctcaaacgcgtttaacggcggcagaagtccctcaagcagttcaccatgacgagcggcactgccttgcagcgttcggaccattttttcggccattgcccgccctgcgcctggctcctgagtgagaggcgcgacatatgggcgaatcagcgtcgacagcgactcttgtaacagccttttcagcgcgcggagacgcttctggcgctgtgccggcagggtagcctgcgacagccactcaatcacccgctgcatgctgtgggtatcgagcgcctggagcgtgccccagcgcagacccggctggcccagcaattgctgcaccgcttcgtccagattctgctttgtggtaaaccgcgcatcatgaggggtaatggcccagaccagccccggcaatgcggattcttcaaccggctgcgtctctttgacccagttttgcaggagccttgccgttttcgcggtctgctggtggtgcgccgtcgcattgcagataaccaggacatccggctgaatgtgctgacgataatgctccagcaaccacaggcattttgcctgcatcatcagcggcgtgttttcctcagaaatggcagggatatcaatgacgtcaacgttatccagcacgcagttctcaacgggcagcaccacttcgcgggtcagagatgccagtacatcgacgggcaggctaatggcgttaagcagctcgccgttttttaccggatgaagcagtgtttcctgtgcttccggcagggtaaacgccccgtgcgtaaggaagccttcgcagggcagaccaaagctgtccaccagcagactcaacggcgccgcaagcgcgctggcatggctggtttgatgcagcacctgggcgaatttaagccactgctgggttaactcctgctgctcaccccacagcagagaccagacgctggcgcgggtgctgagatcaagtgacggaaccagcagggcaaactggtgccacagggcatcatcaatatgctgcttagcgccgggtactacgctttgccagaaccgggcaatggtcgcgacttcccgcgccgtcattcccggcacgctctgcggttgacgcagcgcccgcaacttctcaagccgggcttcaatcaccaatttatccactgcgcggatctgcggatccagcgtggtgcgcgcgataaacagctgcaccagctcggcctccgttaccaggcgcaggcgtaagggaaacgcgtcgtctgcgacctcgcgggacgctctgctgaaacgcacggccatgttggtcggtgcatgcccggggttaatatgcgagaagtaatcaaacgtgcgttgacccggcgtaacgttcagccgttcgtccccgctgccgcaaagtgcagccagcaggtgcgctttcgcggcctgcgagtggccatataagccgatactgccctggctgacaagggcgcgatcgagcgcctcttcacgcgcgcttactgcgttaaggcgggcaagcagggcgtcggcttcgttatccagcatcggggcgtgctgtcgcgtctcgttgatccacccgattaaggcctgagtggtggcagtcgtcgcagtcatttgaggtatacgctcccgctgtcgatccagtagtggctgccgctgtgtcggcgatcggccagagtattcagtttaaaggtcagggcatccggcggcacgggcgtgccgtcctgtagccaggcatcactcagctcgaaagattccgggccttcctgcttagtgccgccacgcagcttcaggcgcacgttcagtacgccgtcgcccgcaatggctttcgccagctcggctgagttgatgctcagggtatagagcggcgtcgcgggccagcgggcattggccagctgccggaagccgagcgtaacgttgccgcgcagcgggaagtgcagacgggcgtccagtttcgcgccgggtttatcgaggtcgatatcgtgataccagacgttctcgtcccgcagggtattgatcgtgttatccagcacgcccagatagcgcaccgtagagtacgcgccgatatccgctgctttaaagttaaagcgcggcagacgaagatccagcgccaggctacaaagcatcgctcccaccgcagcggtggatttcgggttgccgatccgtccctgctggctgaacggataccattcatgaacctggtatttatccagccagacgatgcggttgacgggcaccggttgcaggtggcgaatcagggcctgaacgcccggcagacagcctggccgtccggtgatcagcagaatatcgcagctgtagtgagagatcgcctcacataccgcatgaagcggggcggccagcgtgaactgacccgccagcatggcgtcccgcatctcccggaagctgacgtgcagcggtacgctgaacagatcaaagtgtcctgagccagcaggcaacgcatgatcgatcgcctgctggagatagttcatcacgttgcgcgtcggtttttgcgtaagcaggtcgccaaaggtggcgtgcagcccggccagcggatcgtcaatatcgctcgattcccacgccgccaggatcgcgtgaccgatcggcataaagagctgaagcgccgtctgctggcgcaggaccgcctgggtatcgatccgcccggagtcaccgaacagggatgccatcagctgggaggcatcggctatgccggatttctgaagctgggtttgcagggcgggcagaacgtagcgctggatcacgtccagcagcgtatcatcgccagcgaccttgaacccttcgcggaacagcagctgcggggtgattttgacgttattcccggaaccatcatctaactgatagtgcgtgatggccatatccgtcgtgccgccgccgatatcaatcgaggccacgcgcagcgcacgccccggctggacgccaggctcaggcgcgcgatccggacgggcgagggaggcgaaaaaggcctcggtctggccaccaaaatgggaaatggcttcgttatacagccacaccagctggccgcagctggcctcgtcccactccatctggatctcagggaccggcaccacgcttttttcctgctgcttgcggctggcaaaatcttcatcctgcgggtgccagcccatcgctttccagacgatggcgatggcttcgaacatgcggcgacggaaaatctcgcgctcctgtttcggcattgccgacggcagggtgaggatcagcgtccgcagctggcggggagaggccgggaagccgagccgcaggcgggtggccacgctgttaatctggccaagcgcctgagccagcagctcgcagagcatgtgcgtcatcagggtgctgcggctgtactgcggagagaacaccggcaggcgctcatcctgcggcagcgtaaagagcggttccccgtcgtcgttcatcaggttcatcagcggaaacgcagttgccagcggttcgcgctgggttttgctgttcatctggctaaagcgccagtcctgcaccaccggcgtctcgtcccacagatagcgacgcgggctggagatgccgctgttgccttccgtgcccagacgctgcatcgccagcttacgcgcttcatcacccacgcggacaatcgacggccagacgaacgcatcctcccggccgctttccacggagaagtgctgtttgccaaaacgcgcttcagaaaactcaagtcggctggtaaacagcggctcattcaggaactgcggctcactcagagatcgtacctgaagttcagccgtctggcgcaggccgtcgttggcatcaccatgatcttcaataatcacgccgcaggtatgggtgttgcctacgtcaaggatcaaatcgacaggaatagcaggggtgctcagggtgtgggtgacaaacttcacttccggcacggtgagttgttcaccgagcatggagagcaggttgagccagtgcgcctgatattcaaagctgcgcatggcctgatgcagctcgcgctcggagcgtttttcaaccccgtcggcaaactgcgtgaaggcttcgcgcagccagccgtcaatccaggtctggtcgaggaaactctcaacctcactgtcgcgccaggcgagcgcgaaacgcgtgccgttcaggatatcgttttcaaccggcgacagggcagacgtcgcatgctctgcaatctggctgtcgagcgcgacggtgacccggtgcgtattgccagctgcgtcgggcgtggaaagctttcgtacctggacgcgcgcccagttatccgggccttcaacaaacgtccgcggcgggttaaagcgcaggaaagggatcggcagccagacgccgtccagcacggtcagggagtcatgcagtggaatggtgctttcaggcttgaccacttccggctgcccgccatcggtggcagggagcgtgtaccggccgttaaccaggtcaaaatccagacgcagcagcgggccatttgctgttttacgcacgaaacgcccgttgctggcggtgtcctgcggagtcaggccaaaatcgagaaactgcacgccgctgttagcaatcagcgtcacgctctgtttatagtcgcaaagattaaccagcataggatcagacacctgctttcttgaacgtcagaggaacgacggtgttggcatcgtaacgtgcggtgcattccgccacatcgctggcacctgccttacaggtcacttccggcatcggatagcgtgaaccgtcggtgcaacgcgcgtttccgcgcgttttgatcaacagctcgccgttgctgtgtaatccggaaaagacgtctacccggcagacaatgttgtcgccatgcacgacccgggcgaaacctttattgttctggatctggtagcgcagcgacggcggtttgccggtgagcggatcctgcacatcgagaaatgcgcgccaggtgccgttcaggaagcgcgttaaccccgctttgacctggtttgcctccatcaccatcgcatctttcggtatcgcggtaatgaccaccggttcggctgccggggcaggcgttttcaccttcggctctaccacttcggcctggtgcagcgggagtttcagnnnnnnnnnnnnnnnnnnnnnnnnnnnnnnnnnnnnnnnnnnnnnnnnnnnnnnnnnnnnnnnnnnnnnnnnnnnnnnnnnnnnnnnnnnnnnnnnnnnnnnnnnnnnnnnnnnnnnnnnnnnnnnnnnnnnnnnnnnnnnnnnnnnnnnnnnnnnnnnnnnnnnnnnnnnnnnnnnnnnnnnnnnnnnnnnnnnnnnnnnnnnnnnnnnnnnnnnnnnnnnnnnnnnnnnnnnnnnnnnnnnnnnnnnnnnnnnnnnnnnnnnnnnnnnnnnnnnnnnnnnnnnnnnnnnnnnnnnnnnnnnnnnnnnnnnnnnnnnnnnnnnnnnnnnnnnnnnnnnnnnnnnnnnnnnnnnnnnnnnnnnnnnnnnnnnnnnnnnnnnnnnnnnnnnnnnnnnnnnnnnnnnnnnnnnnnnnnnnnnnnnnnnnnnnnnnnnnnnnnnnnnnnnnnnnnnnnnnnnnnnnnnnnnnnnnnnnnnnnnnnnnnnnnnnnnnnnnnnnnnnnnnnnnnnnnnnnnnnnnnnnnnnnnnnnnnnnnnnnnnnnnnnnnnnnnnnnnnnnnnnnnnnnnnnnnnntcaacgattcacgcaggcagtccagcacgtcgtcgcgcgcgttttcgttaaggttgacgaagccccagaagcagatcaccggcttgccatccacgaggaaaacaaagttttcaccgggaaactgaaaggcttttgagagcagagagccaaacagttgctgcgccgttttcggtgactgaaggcattttttactcagcgactccacgctggcgagcgtgttttccagatagcgcagggcgcgataacgatcatcttcatccgccgccttccagctggagacggttccctcaaccggggagtaccagtcaacgcgatcgccgccgtcgttgacctgaggaatggccaggcaatcaacaatagcctgctgtttgcgcaaccgaagcgcttcgcggatttgcagcgctgattcaaaaacggcctgtccgccgccgccaacggcctgaaaatcatccagattaccgctgcgtaaaagtgtttttgccacgatttggtcctgtagacttcttcacgccattactgtaacgaaacaggtaagcaagcaaacggcggaggagacgacaaaagggacgatttcttgcggcattgatcgtgacggttgtgcttgacgaataatgaaccttaaggcaaatcggtttctgcgggctgatgctaaaaccagcgaaatgtacggctttagaataacctgatagtgattcgttatttgtcaggccaaaacgtctgtgctgttattactgttcactataataaaaccgaaagggtaataaccatgtctacagggaaaaccgtgctcgccctcgcgctgagcgcgctgctaccggcaagcgccgcatgggcggcaaacaaagacaccattatctactgctccgaggcatcgccggagtcgtttaacccgcagatcgccagctctggcccctcgtttgtcgccagctcgcaaacgctgtataaccgtctgattaacttcgacccggtaaaaaacacgccggtgccttctctggccgagtcgtggaccatttcgccagacggcaaaacatacacgtttaccctgcgtaaaggggtaaaattcaacagcaataaatacttcaaaccgacccgtgattttaacgctgatgacgttattttctccgttatgcgtcagaaagaccctaagcatccctatcacaatgtttcccagggcaattacgaatactttaatgacgtgggcctcgacaagctcattcaggatgtgaaaaaaatcgacgattatcacgttcagttcacgctgagtgaacccaacgcggcgttcctggccgactggggaatggacttcgcctcgatcctctctgccgagtacgcggacgcgatgctgaaaaagggcacgcctgaaaatgtggacacctggccaatcggcaccggcccgtatgtgcttcagcagtacaaggtggattcgctgatccgctacgtcgccaatccgaactactgggagggagaggtgccgaccaaacacctgatcttctccatcacgccaaacgttgagacgcgtctggctaagctgcaaacgaacgagtgtcagatcattcctgcgccgtcgccggtgcagtttgaagcgatcaagaaaaacaaagacctgaccctgcactcggtagatgcgctgaacgtggggtacctggcgttcaacacggagaaaaaaccgtttgataacgtgctggtgcgccaggctctgaattacgcaacggacaaaaaggccattgtgaacgcgatctttatgggttctggtacggtcgctaaatcgccgatcccgccgaacatgctcggctttaacaaagacctgaaggattacggctacgatccggaaaaagcgaaagcgctgctgaagcaggcgggtctggataagggcgcggaagtgaccctctggtccatgccggttcagcgtccgtacaacccgaactcgcgacgcattgcggagatgatccaggctgactgggcgaaagtgggcgtgaaggcgaaaatcgtctcatacgagtggggggaatatctctccggcatgcgtaaaggcgagcatgattccgcgctgttcggctggatgtctgataacggcgatccggacaacttcgccgatgtgctgctgggttgtaacagcatcaaaaccggatctaacgccgcgcgctggtgtgataaggggtatgatgagctggtgcaaaaggccaaactgaccagcaacccggacgaacgtgcgaagctgtatggccaggcacaggagattttctaccagcaggcaccgtggattgcgttagctaacggcaaaacgttctacgcgacccgcagcaacgtgaccgggtacagcgtgagtctgatgggcagtgacttctcgaaagcgaagctgaactgatcgtattcttgccgggtggcggctatgccttacccggcctacagttaccacccgtaggcccggtaagcatagagccaccgggcatttggaaaggagtgacaatgtcacatttaaacgatgttatcgcccgcgtcgatgccaccatcgaagagagcataattacccacatgaacgaactgctgatcgaattaagcgatgatgcaggcctcagccgtgaagatcgctatacccagcagcagcgcctgcgtaccgcgattgcgcatcatggtaagcagcataaagaagaggcggaggcgcgccatgcccacctcacgcagggtgggactatcctgtaagggttaaaactggcgccgtgccaccagccaggcgccgaccaccagcatcactgcgccgcagaccgggccaaccagcgcccgcaggggaacgccgttgctcttgaggatgtccatcaccaagccgccaatcagctggcttgccaccagcacggcaatggtcgttgccgcgcccacattctgatacccgctaatactggcaaagacaaaaaatgaccccagcaggccggggatcaacgtccaccagcgcaccgttgacgccagttcgctaaaccccgccaggccatttttcaccagcaaaatgctgacaaacagcacaatccccaccagcgagttcagcagcatggcgataagaatggtggaagaggattgcgtaatgcgcaccatcaaggtgttttgcaccaccagtccaatcccggcggccaccagaaacgccagcgttaacgattgattcatggcagagcatccggatcgctgcgctcatcgagctggagttgcataaaggttaaatccagccagcgaccgaatttggttcccacctgcggcatattaccggtggtaacaaagcccagggtttcgtgcagatgaatcgacgcctggttctgcgcctcgatacccgcaaccatcacatgtttaccaatctggcgggcttccttgattaattccgtcatcagcagccgaccgatgcctttgccctgatgatcgggatgaacgtaaaccgagtgctccaccgtatggcgaaaaccgtcgaatgctcgccagtcgccaaatgaggcgtatcccgtcacaacaccttcttcttcactgaccagcaccggataacccaacagcgtgcgcgcctcaaaccatgcaatacggttatcggtgtcgactgttgtatcgttccagatggcggcggtgtgcagcaccgcatggttataaatttcaccgatagcggcacaatcttctttgcaggcatgacgaacgatcatggttaacctctggctgtgttgttcactatagtagtacgatttactcacaatattacacagttcttgggttgcatcgctacgacaaaatccctatttttttgtcaccaaactgccccgaaaaaccatccgtacactatagtatgacgtcatgaacacaatgagagacaatatgaatcaacgcattagcgcccgcatacgccttgaacgcgagtcgcgagggtggtcattaagcgaactggccgaacgggcaggtatttcacgcgccatgatccataagattgaacggggggacagtagcccaacggcgacgctgcttgcccggttatccggtgccttcggtattagcatgtctacgctcattgcgcgcgcggaaatgcaggagggcaaactgttacgtctggcgaaccagcccgtctggcgcgatccgcaaacccactatttacgtcgtcatgtgtcgccgcgcagcgatatgcctattgacctcgtccaggtggaactgcccgcgggcagcgatgtgccgatgcccgcctcctcttatgcgctggcgcgacagctgatttggttgcaggcaggtgaactggtctttctggagggggacacccgccatgaaatgaaggccggagattgtctggaactcgggccgccgaacgactgccggtttattaacgaaacggatgaatcgtgcctttatctggtcgtgcggcttaatcagtccggctcataatgcaaaggcgatccgcaggataacgtgccagacttgaatgacattttcagctgtaaggagcgatgaatgagtcaatcaactacgcaaaaccgacgctgggtactggcttcccgtccacacggcgcaccggttgccgaaaatttccgcctggaagagcagccgatccccacgcccgcagaggggcaggtgttattacgcaccgtatggctctctcttgatccgtacatgcgtggccgtatgagcgatgccccatcctattcacctcctgtcgagattggcgcggtgatggtgggcggcacggtaagccgcgtcgagacctcccgccatccggattataaagagggcgagtgggttctgggctacagcggctggcaggagtatgaactttccgacgggaaagggctggtcaggctgggacgaaaacccgtcgcacccttcatgggcactcggcgtgctgggaatgccgggcttcaccgcgtatatggggctgcttgatatcnnnnnnnnnnnnnnnnnnnnnnnnnnnnnnnnnnnnnnnnnnnnnnnnnnnnnnnnnnnnnnnnnnnnnnnnnnnnnnnnnnnnnnnnnnnnnnnnnnnnnnnnnnnnnnnnnnnnnnnnnnnnnnnnnnnnnnnnnnnnnnnnnnnnnnnnnnnnnnnnnnnnnnnnnnnnnnnnnnnnnnnnnnnnnnnnnnnnnnnnnnnnnnnnnnnnnnnnnnnnnnnnnnnnnnnnnnnnnnnnnnnnnnnnnnnnnnnnnnnnnnnnnnnnnnnnnnnnnnnnnnnnnnnnnnnnnnnnnnnnnnnnnnnnnnnnnnnnnnnnnnnnnnnnnnnnnnnnnnnnnnnnnnnnaacgcttgtcgtggcggcagccacggggccggtcggcgcaacggtggggcagatcggtaaaatcaaagggtgccgggtcatcggcgtggccggcggggaggagaaatgccgtcatgcggtcgacgtgctcggtttcgacgcctgtctggatcaccatgcggatgattttgccgaacagctggcgaaagcctgcccgcagggcattgacgtatattatgaaaacgtcggcggtaaagtctttgacgccgtgctgccgctcctgaatacctccgcgcgcgtgccggtttgcggactggtcagcggctacaacgcgaccaacctgccggatggtccggatcgcttgccgctgctgatggggaccatcctcaaaaaacgcatccgcatgcagggctttatcatcgctcaggactatggccatcgtatcgacgagttccagcaggaaatgggacgctgggtgaaggaaggcaaaattcactatcgcgagcaggtcaccgaagggctggacgcggcgccggaggcgctgattgggctgctggaagggaaaaacttcggcaaggtcgtgatccgcgtggcggcggactaaacagagcatcggttatggcgggcaaagtccgccataattatttgtgaagatacgatatattgtctttaattaatccataagcattgcgcgccatcggcccagctgagccagaagtggtaaacgtaatattaattgaacaatttttattttaacgcgcgcccttcataccaggcatgacgatacaggatatatcaaaccggcgatgtttttttaaacagtcgctgaaaatggcattttgttttggctacgggaattaaacatgcttgatttggaaaatctggaaaaagcacaaagaatcagtctgacgatgcaagttgagaacagtttaaagggagcgttaattacgggctcattaaaacctggggctcgactcatcacgaaagagattgcggataaattaggcaccagcatcacaccggtgcgcgaagccctgctgcgcctggtgtcggcaggcgcattacaggccacgcctgctcaggcgtttttggtgccagaggttacgctggagcgttataacgaaattaacgccattcgaaaacagcttgagccgatggccgttgcggcggcgtgtcagaatatgaccgagaccaaactggatgcattacgcgcgctgtcagataacttcagtaccgccatgcatcagggcgacgtgcagaaggcgatccatgccaaccgcgtgttccggtttacgctttatcagtatgccgaaatgccgaccctgaactcgctgattgagcagctctgggtacggattggtccgtgtatcaactacctgcacgaagagatgaaagatatccctgcaacgacttaccattatgccgatctgctttctgcgcttgagcaaagggacgtgacggccagtcgggaagcgatcgaccgagccattgatgaagctaatatcctcctgcaacggcaatactacagttaaggatcgcactggcgcacttatttttttattcgttttaaacttccctgagtatattcccggcgcttaaggctaccgggaatgatgttattttttaccggcaacgtgcgctgccggaaaatgttttactcaaagcgataagagaccgacaggcccacgccatagttacggccaggggcgggttcgtaatagcgattgtagccagcgttaacaatctctgaaccgacgtactctttatcaaacaggttatcgacgcgaccaaagatgtccattccccatttgccgtaattgagtttatacccggtattcagaccgaccacggtataagagggcgctttggcggtattggtgtcgtttgtcatcacgtcgctcatgtagcgggcatctgcccccgcgtaccagccttcctcaggctcccagccaaacgacgcataccccatgttacgggcaatacccggcattcggttgccgctacaatctgatttatcacagacgttggtacggtaggtcgcgtcaaggtaggtccacgccattttcagcttccagttctcggcaaactgctgatcgagcgcaatttccataccctgacggcgcgttttaccggcatttttatagctggtacggcgttcattgtctttatctaccacgatctcattgtcggtatccgtgcggaacagcgccgccgtcaggatgccattgccgatgcgggttttgctgccaatctcataggtgttgttggttgacggttgcagattaatattgaggccgcctttgccatcagaacggtaggagagttcgttgatggtcggggtctcaaatccacgtcccgccgcggcatacaggttccaggcgtcggtcacggcgtatttcaccgcaccagccgggagccatttatggtagctggcgtcaccgctgtcatcgccgttttgcggggtaatgtaatgatcgttggagtcaaaccagacggagctgtaacgcacgcccgcctcaacggacagcttttgcgtgagctgccactgggtttgcaggtagggatcaaggttccacatcaggttacgttcgtcacggcgtttgttacccttcacgccaaaatccggcacgccattgttcatcacgaagttttcatacccgcggcgattttcactcatattttcgtagttaaggccggtggtaaacgttaccggcaccagcagctcgccgcggtgggtccagcgggtatcaataccctgataatggcgctgcatatcaattacgccgcccgaatgcgcaggattgtcacgctgagtggacgccggaatggactggtactgggtcatttcacgctcaccggcatacatcatcacgctgaggtcgtcctgttcgctcagctggcggtcgtagcggatcccggcctgggtctgcttaatggttttacgcgtattgtattgatcgccacggggtgactggcgcgggttgttctgccactcctgataactcagtccgcccggatcgttggctttcatgtccacgctgttaaaaatcagcgttagcttgctgacatcatcaatgcgcacgcccagtttcgcgttggcgaggtttttccgtgcgccgctgtggtcgcgatagccatgggtggtgaagcgggtggtggataccgcatagtccacatccccagcctgagtcccgtcgcccaccgcaccggtggccttcatgccgtaacgccaggtgccgtagctgccgtaatagctgctggcttcaattgtggctggctgttgtccggtctgggtgttgatgttgatcacgccgccggaggcattgccgtacagggcagagaaggggccgcgcagcacgtcgacgctctcaatgctgttgaggtcaatgtttgacgtctgcccctggccgtcgggcatggttgccggaatgccgtccacgtacatgcggatcccgcgtacgccgaaggtcgaacgcgcgccgaatccgcgaacggaaagttgcagatcctgagcatagttctggcggttctggatttgcaggccaggtacgctcccaagggattcagaaaggttgatgcgcggtgtggcatgtcgcatatcctcgccgctcaccacgctgactgcggccggggtgtccagttcggagacggtttgcggcgtggcgctgacgatcagggtctgttcatccgcggccatcgcactcagcgggccaaaaatgacgggaacgaagagcagtggtagtgatgccttacgggcagtaataattttcatggagtaaaccggttaagaaaaattcgaaccaaatcaactggaacctgtgtatatatgttaaatcctttgtaaatgttatgaaaactataaccgcacatttcgtgaatgtaaggttttgaaggaaagaaatactccacattcaactgattaatgattactattctcattaaaataacggcaaagcgatgactttgcccaccggaagtgatgtcagcggtaaatctcctcatttaaaaaggaattgttatgtctttacgtcatctgtgctcgccgcgcctgcgtgggtctctgctgttgggctctttactgtttgccggtacgttccaggttcatgccgctgaagagatgctgcgcaaagcggtcggcaagggcgcgtatgaaatggccatcagccagcaggaaaacgcgctgtgggttgcgacgtcacaaagccgcaaaaccgataagggcggcgtggtctatcgtctggatccggtcacgctggaagtgacgcaggcgattcataacgatctcaagccgtttggcgccacgatcgataacgccacccagacgctgtggttcggtaacaccgtcaacagcgccgtgacggcgattgacgccaaaacgagcgaggtgaaagggcgcctggtgctggacgatcgcaagcgtagcgacacggtgaagccgcttcagccgcgccagctggtggccgatgacacgaccaatacggtgtacattaccggtatcggcaaggagagcgtgatctgggttgttgatggcgcaacgctgaagctgaaggacaccatcaccaacaccggcacgttcagcaccggtctggccgtggatgcgaaggcaaaacgcctgtataccaccaatgcggacggcgagctggtgaccattgatacggcaaccaacaaaatcctcagtcgtaaaaaagtgcaggatgacggaaaagagcacttctacctgaacctgagcctggacactgccggccagcgtgcgtttgtgacggattcaaaacagccagaagtgctggtggtgaatctgaaagatggcagcgtgatgcagaaaatcgccgcgccagcatcgctggccgtactgtttaacccggcgcgtaacgaagcctatgtgacgcaccgcgaggcgggcaaggtgagcgtgattgacgccaaaacctacaaagtgaccaggacctacgataccccggtttacccgaacagcctggcgctgtctgcggacggtaaaacgctgtacgtaacggtgaaacagaaatcaacccgtcagcaggaagcgacccagcctgacgatgtgattcgtatcgcgctgtgatggtggaattgcccggtggcgctgcgtttaccgggcctacaaaaccatgagatgtaggccgggtaaggcgaagccgccacccggcttttttattaacgcgaggtttcttctaccagcggtgcgtcgtgcttttcatcgtcgtgatgaagcggcgcggtgctgtggatctcgtgaacgcgcttacgcacgccgaaccagccagcaatcagcagaaccgccagcagtgggatcgtcgcgatggtgtaagtaccgttcgggtagtcaaacgccatcagtaccagcacgctgaacaggaacagcagggtgagccaggaggtcaccggtgcgcccggcatcttgaagcacacatcagccgctttgccttctttgatcgctttgcgcagacgcatctggcagaccacaataaaggcccaggaggcgataatccccagtgcagccacgttcagaacgatctcaaatacgcgggacggcaccagatagttcaggaacacgccaaagacgtaaaccaccagcgtggccagaatccccgcataaggaacctgctgcctgctcatcttcgacataaacttcggcgcagagcctcccatcgacatggagcgcaggatacggcccgtcgaatagagcccggagttcaggctggagagcgcggcggtcagtaccacgatgttcatgatgctgcccacgtacggcacgcccagcttagagaagaaggttacaaacgggctttgccccgcctggtatgcattccacggcagcagcagcaccagcagcaccacggaacccacatagaacagaccgatacgccagatcacgctgttgatggcttttggcaccatcgtctgcggatctttacattcgcctgccgccgtaccgaccagttcgatggaagcaaaggcgaacaccaccccctgcaccagcaccagcgcaggcagcaggccgtgcgggaagaaaccaccgttatcggtaatcaggtggaagccggttgcgttaccgtccagtggtttaccggtaccgaggaatacggttccgaccaccaggaagatcacaatggccagcaccttcaccagtgcgaaccagaactccatctcggcgaaccatttcacgcctatcatgttcatggtcccgacaattgccagcgccccaagggcgaacacccactgcggcacatcgccaaacgcgccccagtagtgcatgtacagcgcaacggcggtgatatcgacgataccggtcatcgcccagttaacgaagtacatccagcccgcgacatacgcggctttttcaccaagaaactcgcgggcgtaagagacaaagctgccgctggaagggcggtggagtaccagttcgccgagggcgcgaaggatgaagaaagagaagatcccgcacaccagatagaccagggcgagagcggggccagccatttgcagacgtgcgcctgcacctaaaaacagacctgtaccgatagcgccgccgatggcgatcatctgcacctgacggttgcccatcgccttgtgatagccctcttcatgagagttcaaccagcgacgtttcgcagcatgatgatcggctgcgcttttattgcttgttttcattgagttacctgtttgcctgtctgaaccattaacgtgatagtcctgcctggcagaagccgaaacaaacgattgcttctgcgcagacacatgctgcctttccagtcattctgtgtatggataaggcaaaacatggcgaggcatcctacccgcaattgataagcgacgcaaaatataaccgtgccgaaagtgatgcacgtcgaaggaaatcgtgtggtcagagcagacggggatcacaacgcgctgaatcgtggcgttttttaggcaaaaaggtcggcgaatgctgatttaatcatcaggtttacttaatagttacttataggtagagactatgaatgccgcagggctgcaatgagtaatgcaaaggcggtagtgtgctggcggcggctcggataatacagatggtatcccgtaaaagccgggcaccaggcttcaagcacacgcactaaccggctctcagcaagggcgtcctgaaccgcatcttccgggacgtacgccagccccagaccgttttcggcggcatcgatgcgttgcggcaggctgttgaggatcagctggccgtcaacccgcacgcgcagctcacgtccgtcccgttcaaattcccaggcatataatccgccgcgtgtgggcaggcgcatattaatgcagcggtgctgatcaagctgctccggcgtttccggtacgccgaaacgttgcaaatactctgccgacccgacgaccgccatgcgcatgtccggcgcaatacgaacggcaatcatatctttcgccacctgctcacccagacgcacccccgcgtcaaagcggccatcgacaatatcagtcagcccattgtccaccgtgacttcaacgttgatgtcaggatactgcgccataaagggtttaagcacaggccacagcaccgcagacatggcgtgctccccggcggtaaggcgaatattcccggcaggtctgtcgcgggtatcacgcagcgcggtgagttcctgctcgatctccagcagatgggggcttaagcgcataaagagttgctcgccggcctcggtaggggccacgctacgggtggtgcgggttaacagacggacttccagcctcgtttccagattgcgcattgcgtggctgagcgccgactgagatactccaagctgcgccgcggcgcgggtaaagctgcgctcccgggcgacgaccataaaggaaagcagatcgttgaagttgtcttttaacatggcggtttactcgatttatgaaatgaattcatggttcctttctgattatgcactctaatgctccccatggctttacgctactgttaacgcaacagcaaacgaggagttaatcatgaaaattatccgtagcggttcgttaccttccgttcaggggccagaggcctggtttaccggctgcgtgcgcattgacgcgcctttccaggcgactgaaccggcaaaagtcggcggcgcgaccgtcacctttgaacccggcgcacgtaccgcctggcatacgcatcctcttggacaaacgctgatcgtgacgcaggggcgcggctggttacaggagtgggggaaagaggcggaaccgctgaatcagggtgatatcgcctggatcccacccggcgtgaagcactggcacggcgcaagcgcgcagacggccatgacccatatagccatcgcagaagccgtcgacgggagtccggtggcatggctggagaaggtcaccgacgagcagtatccgaacgagtagtctggcgtttcgtaaacaaattattaacgttatgattcgatccgttttcttcagcatgtgcaggcggaacggtgaaaatcaatatcataggcaccagcggaagtgggaaaagtacgtttggcaggcgaatcgcggaggcgctggctatcccttacattgaaatggacaggctttactggcgagcgaactggcagggaacaccggatgatgagtttcttgcaaccctggaaaaagcgctcgccgcctcgcctgactgggtcctggacgggaattacaaccgcacacgcgacgttaagtggcgcgacgtcgatctggtggtgtggatagatcgtgggtttatccgcacgctctggcaggcggtgacgcgggcctccagacgcgcctggcacaaacaggagctctggcccggcacggggaaccgcgaaagctttcgtcggtcgttccttagcaaggactctattatcatctggacgatcaaaacctggcgcagcaaccgcaaacgatatgaggcggatatacaaaacccgcagtacgcacacattcgctttctccgcattacccgacggcaggatgcggaaagactcattacatcgctcaaatcacgccgatgacagactctctattgccgttttccggcaatccaaatgtaaattaattgtttctcagaggtgaaatccacctttaataatgacgacatgttaagtcaaacgagaacgcaacatgtcatggcgaatcagcattctggataaaagccccgtcgcagaacacgaaacagccgccgatgcgctggcgcgaaccttagcactggcgcaacaggcagaaacgctgggttatcaccgcttctggattgccgaacaccacaataccccgcagcttgccagcccctcgccggagctgctgattgcctggatcctcgggcaaacaaaacgtattcgcgtgggctcaggcggcgtcatgctgcaacattacagcccctataaagtcgccgaaaattttaacgtactggccgccattgcgccgggccgggttgatctgggcgttggcaaagcgcccggcggtctgccgctctctacccgcgccttgcagcacggccttaatccgcaggaaaaaggcagctttgctgaacaactgacgcagctcgatcgctggatccgccctgaaaatcagtcagcggaggaggacgttcgcgccacgccgctgccgccggtgcctgcccgggggtttctgctgggcgccagcacagaaagcgcgctgctggcggcctccctcgactggcattttgtctttgccgcccatctgaacggcgatcctgagctgctgcgcgaggtcgtcacagcctggcgtcaacacagcgtccgggaggtgattgtggccgtgcaggtcattgttgccccaacccaggctgaagccgatgcgctggcgcagaaggttgaagtgtggggtgtggagctggcaaacnnnnnnnnnnnnnnnnnnnnnnnnnnnnnnnnnnnnnnnnnnnnnnnnnnnnnnnnnnnnnnnnnnnnnnnnnnnnnnnnnnnnnnnnnnnnnnnnnnnnnnnnnnnnnnnnnnnnnnnnnnnnnnnnnnnnnnnnnnnnnnnnnnnnnnnnnnnnnnnnnnnnnnnnnnnnnnnnnnnnnnnnnnnnnnnnnnnnnnnnnnnnnnnnnnnnnnnnnnnnnnnnnnnnnnnnnnnnnnnnnnnnnnnnnnnnnnnnnnggccagcgaagaacaggcctacgtcctttgcgcggcaggcggggagtgaaccggtgcgcatcgcgcgtcgggcgcagtctctgctggccggaacggcggcgtcggtgcttgaacagctcaacgcgttgcatcagcagtgggggattgacgaatttatcatcgacacgccggtcgctgatggcgcaacgcgcgtgcagtccctgcgactgctggccgaggcgcgtcttaacagggaggtgaccgtatgagctttagcgaacaactgattgcctggcgccgtgagctgcaccagaaccctgaactctccggtcaggaggtcgaaacaacggcgcgcctgcgcgagtggctgacggccgccgggattgccccgctggattacgatctccagaccgggctggttgcggagatcggcacgggcaacgcactggttgcgctgcgtgctgatatcgacgcgttacccatcgacgagcgcagcggggtgccgtttagctcccggcgtgccggggtgatgcatgcctgcggacacgacatccacaccagcgtgatcctcggcgccgcgctaaagctgaaggagcgggaagcctcgcttaacggtcgcgtgcggctcctgttccagcctgcggaagagaatttcggcggagcgaaaagcatggtgcgggccggggcgttacgcgacgtacgcgcgattttcggaatgcataacgagccttcactgccggtcggcgagtttgccacgcgcggcggcccgttctatgccaacgtcgatcgcttcgttattcacgtgaccggcaaaggcgcgcatgccgcacgtccccatgaaggcaacgacgccatcgtgctggcaagccagctggtaaccgcgctgcaaagcgttgccagccgtaacgtcaacacgctggattcggttgttctgagcgtgacgcgcatcgccgggggaaatacctggaacgtgctgccggaaagcgttgagctggagggcacgctgcgcacgcaccgcacggaagtgcagcagaacgtgaaagcgcgcgtcggtgaaatcgccgccggatttgccagcgcctttagcgcgcaaatcaacatcacctggtacgccgggcccaccgcgctggtgaacgatgagcactgggccgggtttgccacctcggtcgcgcgcgaagcgggatatgaaacccggcatgcggaactgcacatgggcggggaggatttcgcggtctatctgcaaaacatacccggcgcgtttgtcagcattggcagcaacagtccgtttgggttacatcacccggcatttaacccggacgaagcattaatcgaacccgctgcccgctattttgctcagctcgcggaaaaagccctgcaacacgtttaattaatttgaggtgaatatgtctgcacatcgtcaattgcggctggggaccattttgcatggtgcatccggaaatatgtctgcctggcgccacccggcggcggtcgcggatgccagcattaattttgatttcgttaaagaaacggctttaaaagcagaagagggcaagctcgactttatatttgtggccgacggcctttatattaacgagaaatccattccgcattttttaaaccgctttgagccgctgacggtgttgtccgcgctggcgagtatcacctcgcgcctggggctggtcggcacgttatccacctcgtacagcgagcctttcaccgttgcacgccagttcgccagcctcgatcacctgagcaacggacgcgcgggctggaacgtggtgacgtcaccgctggaagggtcagccaggaacttctcccgcgaaaaacacccggagcatgcgctgcgctaccgcattgccgatgagtatctcgacgtggtgaaggggctgtgggattcctgggaaggggatgcctttatccgcaataaagagagcggacagttctttgatgcgtcgaaactgcatactcttgatcaccacggtgatttcttccaggtttccggcccgctgaatattggccgcacgccgcagggacgtccgattgtctttcaggctggtgcgtccgacgacggtaaaaagctggcggcaaaacacgctgacgccatctttacccaccatgacacgcgggaagaagcccaggctttttaccgcgatgttaaacagcagctggaaagtcacggccgtcgcgcagaggatttacatatattccagggcgtcagcgtgattgttggaaacgacgccgatgacgtagaaaaccagtatcaaactacggcggcactggtctccattaatgatgcgctgaattacctcggacgatatttcgagcatcacgacttcagccagtatcccctcgacgcgccgttcccggatattggcgatttgggcaaaaacagcttccgcagcaccaccgatgaaatcaagcgtaacgcccgtgagcgcaacttaactctgcgtcaggtcgcgctggaagccgcatcgccgcgcccgcgtttttccggcacaccggagcaggtggccgatggtttacaggcctggttcgaagagaaggcggcggatggcttcatcattcagggcggcacgccggacaccttcccgcgctttgtcgaccaggtggtgcccgttttacaggcgcgcggcctgttccgcaccgactatcccggcaccacgctgcgcgaaagtctgggcttagacgagcccaaaaatcagttcacacaacaataaaagagaaaaatgctatgcagaaatcatcgcttattctggcgcttgcgctggcctttacccctgccgtctgggcagagaacgtcaatattaacggcaccggcgtgagcattgaggccaataaaacgccgatcaataccgccaaaaacagcgatgcgatcgcgcaactgccgaaagactatcgttttgccgtgccggggaaatttaccgtggcggtggcgggactgaatcaaccgccactgacggtcttttccgacgacaacaaaactctgctgggaagtgaggtcgacatcgcgcgtctggtagcggacagcctcggactggagctgaacgtggtgcccacctcctgggaggattggccgctgggggttgcctccgggaaatacgacgcggctatcagcaacatcaccgtcactaaagcgcgcaaagagaagttcgacttcgccacctaccgcaaggattcacttggcttctacgtgaaatccaccagtccgatcaactcgcttgtgaaggcagaggatatcgccgggctgcgcatcatcgtgggttccggcaccaaccaggaggccatccttctggcatggaacgaagagaacctcaaaaaagggcttaaaccctttacgccgatctacaccaaagacgacgcggcccaaacgctggcgcttcagtccggacgcgcggacgcctactttggcccgaacgtgatcggtgcctggaaagcggcgcttaacggtaaaaccaaactggtcggcagcgtcgacggcggctggccgaaggcggcgcatatcgcggtgacgctgaaaaaaggcagcggcctggtcgagccggttcaaaccgcgctgaacggcgcgatcaagaacggagattacgacaaggtgctgaaccgctggggggaaggcgtggagcgtatccccagttccgaagttaacccggcgggtctgggcgattaaggaggcggtatgcgcgaacaatttcgtgacgtttcgccggaagatgccgatcttcagcccattatcgaggggcttttcggtgagtacgccgctcgttacggcgactacttttcaaaggatgcggaagtcgagctgacagagtggtacctggcgccgcaggggctgtttatcgtcctggagcgcgatggcgagatcatcgccaccggtgcgtacaagcccttcgacgaacataccgcagagatcaaacgcatctggacgaataaaacgctgcgccagcagggactggccgcgcgcgtggtacaggagctggagcgccgggcggtgctggcgggctacagccgcatctacctgaccacggggtttcgccagccggaggcggtgcggctctatctcagccaggggtaccagccgcagttcgatcttaaccgtgatccggaagagtatagccagccgccgttcgacggtcggctgcgtttcaccaagacgctgatccgcgaagcgctcagcaaaaccgcataaggagcgacgatgagcaacgttgaaaccataaaagtggtcccggcacgttatccgctgcgcgctgctggcgccgtggtggcgctgtttgtgctggcggtcgtgatccagtccgtggcctttaatccgcgctgggaatgggcggtatttgcccgctggttcttcgacccggtgatcctcgaaggcgtcggccagacgctgctgctgacgttgataagcaccgtactgagcgtggtgattggcggcatactggcgctggcgcggctctcgtcatcatggctgttgagcagcctggcgtggggttacatctggctgttccgatcgctgccgctgatcgtggtgctgattatcctctataacttctcctatctctacgacacgctctctctcggcgtgccttttaccggcattacctggggcagctttgaaaccatcaatgttctcgggcagttttctaccgccatcgtggggctgacgctggtgcagagcgcctatactgcggagatcattcgcgggggtttccttggggtcgaccacggtcagtatgaggcggccgctgcgctaggtctgccggcatggcgtcgcacggtgcgcataattctcccgcaggcgctgcgcaccatcctgccgtccgggtttaacgaaatcatcagcctcgccaaagggacggcgatggtttacgtgctggcgatgccggaactgttctacacgatccagatgatctacaaccgcacccaggaggtgatcccgctgttgatggtgggggccgtctggtatctggtgatcaccaccgtactgtctgccatccagcatgttattgagcgtggactcgcccgcagcgagcgccgctccgccgttaaccacaaccgggcgaccagtcgcgcgcgctccgtcaccacttcgccagcacaggagcctgttcatgcaagcctctcctgaaggacatatttccattaccggcgtcagtaagttttttggccgacataaagcgctcgataacgtcacgcttgagatcccgccgggctccgtgacggtgatcctcggcccctctggatcgggaaaatcgacgctgctgcgcaccattaaccatcttgagcgcgtagacgaaggctttattcagattgacggggattacatcggctatcgccgtcagggtgacaaactctacgagctcaaagagaaagagatcctcaaacagcgcgtcaacgttgggtacgtgtttcagaacttcaatctttttccgcatctcacggtgctggaaaacctgattgaagcacctatcgcgcataaaaagttcagtaaaaaagaggctgttgaaaacgcctacagcctgctggatgtggtaggtctgcgcgataaagccgatgcctggtcgcgtcacctctccggcggccaacagcagcgtatcgccattgcccgcgcgctggcgctgcgcccgcgcgtgatgctgtnnnnnnnnnnnnnnnnnnnnnnnnnnnnnnnnnnnnnnnnnnnnnnnnnnnnnnnnnnnnnnnnnnnnnnnnnnnnnnnnnnnnnnnnnnnnnnnnnnnnnnnnnnnnnnnnnnnnnnnnnnnnnnnnnnnnnnnnnnnnnnnnnnnnnnnnnnnnnnnnnnnnnnnnnnnnnnnnnnnnnnnnnnnnnnnnnnnnnnnnnnnnnnnnnnnnnnnnnnnnnnnnnnnnnnnnnnnnnnnnnnnnnnnnnnnnnnnnnnnnnnnnnnnnnnnnnnnnnnnnnnnnnnnnnnnnnnnnnnnnnnnnnnnnnnnnnnnnnnnnnnnnnnnnnnnnnnnnnnnnnnnnnnnnnnnnnnnnnnnnnnnnnnnnnnnnnnnnnnnnnnnnnnnnnnnnnnnnnnnnnnnnnnnnnnnnnnnnnnnnnnnnnnnnnnnnnnnnnnnnnnnnnnnnnnnnnnnnnnnnnnnnnnnnnnnnnnnnnnnnnnnnnnnnnnnnnnnnnnnnnnnnnnnnnnnnnnnnnnnnnnnnnnnnnnnnnnnnnnnnnnnnnnnnnnnnnnnnnnnnnnnnnnnnnnnnnnnnnnnnnnnnnnnnnnnnnnnnnnnnnnnnnnnnnnnnnnnnnnnnnnnnnnnnnnnnnnnnnnnnnnnnnnnnnnnnnnnnnnnnnnnnnnnnnnnnnnnnnnnnnnnnnnnnnnnnnnnnnnnnnnnnnnnnnnnnnnnnnnnnnnnnnnnnnnnnnnnnnnnnnnnnnnnnnnnnnnnnnnnnnnnnnnnnnnnnnnnnnnnnnnnnnnnnnnnnnnnnnnnnnnnnnnnnnnnnnnnnnnnnnnnnnnnnnnnnnnnnnnnnnnnnnnnnnnnnnnnnnnnnnnnnnnnnnnnnnnnnnnnnnnnnnnnnnnnnnnnnnnnnnnnnnnnnnnnnnnnnnnnnnnnnnnnnnnnnnnnnnnnnnnnnnnnnnnnnnnnnnnnnnnnnnnnnnnnnnnnnnnnnnnnnnnnnnnnnnnnnnnnnnnnnnnnnnnnnnnnnnnnnnnnnnnnnnnntgctcatctggtttgtggcgaacgtctatcccacctttacgtatgcagattacccggaacgctgggtgcctgatgccccggaacagctgaagaaaaattgcattgagtaccgaaaatcgctctatctgtggttcgacagccagctcagcgcctcgccgtttgcgtttggcaaacagctgacgctgcttgacgtctatattgccgttgcgcgtacctgggggccacgtcatgagtggtttgccactaacacgcctaatattaccgccgtcgcggatgccgtctgcgcgctgccggaactgcacaaggtgctaaaagctaacgatataatctgataacgtggaacgctcacctataaaaggagccctgcccatgccacacgttgatatcaaatgttttccacgcgatctgactgacgaacaaaaaacggccctggcggcggatatcgccgaagcgatcgcccgtcatctgaacagcaaagatcgctcaatctccgtggcgcttcaggaggttcaggaagctgactggaaagcgcaggtctgggataccgagatcggcccgaagctggatgaactgattaagaagcccggctattcgatgtaacttgcctgccgggtggtgcaatatcacccggcgctcctcgcttttattccctttcgcaaaaatcgataataaaaaccataacgattccgctacaattcatccatccgaacaatatccgttaaatcagcaggtaaacactgcaactgcaccagataaagtacaaattagtaaaaggataatttttccatgacaaaattacctcagttttcactcgcgtttattcatcctcgttactggctcagctgggcaggcattgccgcgctttggtgcacggttcagcttccgtacccgctgctgttgaaaacaggtcacgggcttgggcgtctggccatgcgcctgcttccacgccgcgtggagatcgccagacgaaatcttgagctttgttttcctgatatgaaagaggacgagcgcgagcgtttacttgagcgtaattttgaatcggttggaatgggcgtcatcgaaaccggtatagcgtggttctggccagactggcgcgtacggaaacacttcagcgtgaccggctacgaacatatggaacaggcgcgggcgcaaggaaggggcgtggtgctcattggcatgcattttctcacgctggaattaggcgcacgcatctttggcatgctcaacgcgggtattggtgtgtatcgtcccaacaataatgcgttgctcgactggctgcaaacgcgcggtcgtctgcgttccaataaaaccatgcttgaccgctatgacctgaagggcatgatccgcgcgctgaagcaaaacgagatcctgtggtatgccccggaccacgattatggcaaaacgaatagcgtgtttgtgccgttttttgccgtcccggacgccgcgacaactgccgggagctacatgctggtgaaaagtgccagaccggccgtgatcccgtttgtaccgcgcagaaaagcagatggcacagggtatgagctgattattctggaagatattagcgataccttgcagggaggcgacaaagcgtcggtggccacgcaaatgaacagagcgattgagcgcgccgtgatgatggcgcctgagcaatatatgtggctgcatcggcggttcaaaacccgccctgaaggccagccggaccggtataaacgcaaaaaacagatcccatcttctgcaagaaccttatctgccagcgatatttcggaccggtcgagtatccagcagtagcccggcagggcggatgccggtgcgctccgccctttataaatcctgccgcgctggatagaattaccgcatccacattgacgggatgcccaacatgaccggaagagtcgattatcatctggaaaaatacctcctcaccgaagccggtgagccggaacgtctgacgcgccagtgggcggaggtgatgcgcgagtgtcatgaccagaaatccggggcagaagagcggctgcgtctcgcgctgctgaacgtggattatgtgaccagctttgagcttcccttccggttacttcttacccgtgcaccgcagctgattgatagcatcagaaatgagtttcagctcagtcaaaaaaaatgtcctgttcaacgggaagcggtttggctgcgtctacagccttaaacaggatttgaacggcattccggatgaatttacctaccacctgaagacccgtattcagcggatcgatgcgtccggcggttcggaagtgccttaccggcaaatcgctcagcaggtgaaagccccccgcgagcgcctccagctggcgctggaacaggggcttgcggtcaccgcgcttgacgggcttttctggttttgcctccagcgcatagccgccgaggtgcagcggttaaggaagaccgggatgagaatagtcacgtccgatacggaggtgttcgacacccttaccggaacaatacggcgcattccggtttatcgtcttgaggacgctgccgctacttagcctggagcaggatcgccagcagtccaggaaagcgggcgtccagatcctctcttctcagtgagatcatattctcgcgcccctgcgggcgctgccagatcacgccgctgtcgcgcagcacgcgccagtggtgagtcatagtagatttcaccacctcttccgggcgcagcgcgttacagctcagttcgctgccgtcggccagcctgcggataatcgctaatcgcagcgggttgccgagggcgaacagcacattttccaacactatttgttcaggttccgggtggtttgggatcatcgttttcctgcgtctcgcgtgagattgagctatatcaacaataggtcaaccgttaaaaaatagttcgataatactcgtacaataggactattataacaaacgaacgaacacgcgaccatcccggtcgtcacaaaccagtcatgaagacttaaggaaatatcatgccccgacccattccactcgaacgttatcgcaacatcggtatctccgcgcatatcgatgccggcaaaacaaccaccactgagcgcatcctgttttacaccgggatgagccacaagctgggtgaagtacacgatggcgcggcaaccaccgactggatggcgcaggagcaggagcgcgggatcaccattacgtcggcggcggtaagctgtttctggcccggtatggacagaggctttgaaccgcaccgcatcaatattatcgacacccccgggcacgtggatttcaccattgaggtggaacgttccatgcgtgtgctcgacggtgcggtgatggtctatgactccgtcggtggcgtgcagccgcagtcggagaccgtctggcgtcaggcgaataaatatcacgtcccgcgcctggcattcgtcaacaaaatggaccgcccgggtgcggatttcttccgcgtggtgcagatgatgcaggagcggctgaaagccaatccggtcccgattgtgatccccgtgggggcagaagaacacttcaccggcgtggtggatctcatcaagatgcgcaccattctgtgggacgatacgacgcagggcatggcgttcagctatgcgccagtgcctgacgatctgctgagtaccgcccaggcgtggcgagaaaaaatggtttcggctgcggcagaagccagcgatgagcttatggataagtaccttgagacgggcgaactggatgaagcggaaatcatccaggggctgcgcgtccggaccatctccggtgaaatacagcccatgctgtgcggcagcgccttcaagaacaagggcgtgcagcgcatgctcgacgcggtaattgaattgatgccgtccccactggacgtgcccgctattgatggggttgacgaagacggacagcacgccgagcgccacccaagcgatgatgaaccgttctcggcgctggccttcaagctgatgagcgatccgtacgtcggccagctgacctttatccgcgtctattccggcatactgcgtaaaggcgacgcggtgtacaacccggtgaagggtaagaaagaacgtatcgggcgcatcgtgctgatgcatgccaacgatcgccatgaggtggacgaactgcgcgcaggggatatcgcggcctgtgtcgggctgaaagacgtcaccaccggtgacacgctgaccgacccgaatgcggtgatcacccttgaacggatggagttcccggacccggttatttcgctggcgattgagccgaaaaccaaggccgatcaggagaaaatggggatcgccctacagcgcctggcggcggaggatccgtcgtttcgcctgcacacggacgaagagtccggacagaccattatctccgggatgggcgagctgcatctggagatcatcgttgaccgcatgaagcgtgagtttggcgttgaggcgaacattggtcgtccgcaggtcacctaccgtgaaactctgcgtaaagcggtgaaggatattgaaggtaaatttgtccgacagtccggcgggaaagggcagtacggtcatgtggtcctgagccttgagccgttagccgccgggagtggttttgtgtttgaagatgccaccaaaagcggggtggtgccgcgggagtacatcccgtcggtggaaaaaggcttgcgagaagccatgaatacgggagtgctggcgggctatccggtggtggatgtgaaagcgaccctgacgtttggttcctaccatgacgttgactcctcggagatggccttccgcatggcggcgatcctcggcttcaaagagggcgcacggcgggcggatccggttattcttgagccggtgatgcacgttgaggtggaaacgccggaagagtacgccgggaacattatgggcgatctctcctcccgtcgcggcctggtgcaggggatggcagagcagtacggcagccagattattcgcgctgacgtcccgctggctgagatgtttggctacgccaccacgctgcgctcgatgtcccaggggcgcgcgacgtatacgatggagttccatcattttgcggaagctccgcggaatgtggcggatgagatcattgcgaagcgtgtgaagtaataaaaagccctcctcctcaggaagagggcttttcttttttgaggtgcgttaatccagcgccttcaccattttcccgctcgcgacaaacgtacccgcacccagatgatgcagcgtattcagcttatccccgtcaaactgccagcgtccggcgacaaatgcgcgttcatccgccgcggcggaaaccacttcgccaaacagagtgtcatatttctctgccgcagaggttacaggtaataaccggcactccatccacgccagacatttctcttctataaccggcaggccaagctcagggccataaataaccgggatcccgtagcagttgaatttatcctcgtcgcgcccgctgacgctgccgaccgcccaggtccagttggctgccgccacgccggggatcacaatgccgaatttcccgctgcgttcgatcaactcccgtgaccacgcgcttttgtctaccacaatcgcaatacgcgggggttcgaattccaccggcatagaccatgcggcggccatgacgttgcgacgatcgatggtttcatcccggctggtgatgagcacggttggaccgtgattcagaaggcggctggcgtgacgtaattcaacagggcgaaagtggctcataggatctcctcatgtacacgatgagtatgacgaaaaagcacttttacgcatatgcataagggaaaatagtttataaacaggggatatcacatcctggagcatatcatgtccccatttctgagtgcttatttcgcccgcacgggctggcagcagcccgtacaggttgatatcgataccctgcgggggctgcatttacaccataactgcgccatccctttcgaaaatatcgatgtcgttttgccgcgtgaaatccatctggatgacgggtgtctggtggataaactggtcaccgcgcgtcgggggggatattgcttcgagcaaaacggcctgtttgagcgggtgttgcgcgaagtcgggtttacggtgcgcagcgtgctggggcgggttgtgctggccaatccgtcgcagatgccgccgcgtacgcaccggttgctgctggttgagctgaacggcgagcgctggatcgccgatgtgggatttggcggacaaacgctgacggcgccgattcgtttgatcgccaacgaggaacaggaaaccccacacgggagttatcgtttgctgagcgagggtaacgactgggtactgcaattccgccatcacgagcactggcagtcgatgtaccacttcgacctggcgacccaatacttcaacgattacgtgatgggaaacttctggtcggcgcactggccgcagtcccatttccgtcatcacctgctgatgtgtcgccacctgccggacgggggcaagctgacgctgaccaactttaattttacccactggcagaacgggcatgtggaggagcagatccatttgccggatgcggaggcgctgtataagctgatgcaggcgcggtttggcctgggcgttgatgacccgaagcacggctttaccctggcagagctgacggccgtgatggcggggtttgatacgcatccacaggcaggtaaatagcccggtggcggctacgccttaccgggcctacgggtgcccgaacgtaggccgccattcggcgggttagtttaaacatcatcgaaggcatgctgatatggaaatcttgttgcggaataaattcagttcagtgggaatgttactcggggttattgcactgcttgtctcattagtgcagttcacctttggtcctttttcaacaaagtcgacagcgcttgaaattgttgtggctgaaaaggtttcggcggtgaaaaaagggattattgctggcatcaaaggggagcaaccgaccgttgaggcgaaaaagaaaacggtcgatatcgacagtattcttatcaatagcggagtaattttgtctgtggtggcattagggcttgccttcacgggtgggatgcgcaaagagaaccgatggggggtgagtggcgcactgtttttttctggggctacgctcgcttttcatgcggcgttactggcttttggtctgatcgtcgcagtgttgctgctgctgttggttatttcagtcgtcagcggaagtacgctgttctgacagtgcggcccgttggcggctacgccttaccgggcctacagcggcttgaaacgtaggtcgggtaaggcgaagccgccacccgacaaaatcaacggcgcgatctcactacctgatagcgacgggtgaagtactcaaacggcgcgctccacacgtgcaccagacgggtgaacgggaagataaggaagatcgtcatccccagcaccagatgcacgcggaagatcggtgcgacgccgctcagcatttctgacgagcctcccttaaacgtcacgatcccctgcgcccagccgaccagcttcatcatttcgcttccgtcaggatactgggcggagaaaggaatggtcgacagcccaaggatgcactgaagcagcaggatactcatgatgataatatccggcgtggtggatgtggcacgcacccgctggttgaacaggcggcggatcagcagcatcgacccgccaatcagcgtcagcaccccgcaaatcccccccgcaatcatggctaactgctgtttaaccgcgacgggtaaaaaccaggcgtacatccagtgcggggttaacatgccgaacaggtgtccgaagaaaatccccagaatgccgatatgaaacaggttagagccccagttcataccgcgcttgctgagcatctggctcgacgaggcgcgccaggtgtactgcccgtagtcgtagcgcaaccagctgccaaggaaaaacacggtggcgcagatgtacggataaatgtcatagaaaaacacgttcaggtaatgtgtcattttgggcctccggcgctgacgtccacgtactgcggcgcgacgtcctggctaaagcgtcgttgatattgctgcatcggcgagctgtcgcacgatgtggcgttgtcttcgataaacttgacctgttcctcttcccacacggcgtccagcgcctgacgggtatcatcccgtttttcaccagacacctgcttcgccacgctgtcgctggaaagccgtgtaccggccagcgtcagcagggcgtcaaacagctggtaatgtgccacctcgcgctgtttcagccggccgccaatcagcgccaggatcggcgcgacgttttgcagcccttcacgcgcctcgtcatcgctgacgatactgagatattccagatagagcggcagatagtccggcagctcgcggcagtcaagctgaaggccggctttctcatactggctcatcaggtcgaccatcgcctgaccgcgatcgcgggactcggcgtgaacgtgttcgaacagcagtagcgaggttgcgcgcccgcgttcaaacacttcgcaccattcggcctgcttatccagcagcggggcgctcaggtgctgctgcgcaaacggcagcagcatgggcgcgtcctgttccaccagggaaagcgcttcgtcacggttttcccacagcaactcatcgggatactcaatgaacagcgcgatgattttgaggatctgcattattctccctccccgtgttcgcgcacttcggtgatgttgatcgcgtcgatgcggctgctgttgaagaggttgaatttggtgtcggaaccgtggcagccgtcgccaaaggtgaagccgcagccgtttttctccgggaaggcgtcgcgcgccatttcgcggtggctggtcgggatcacgaagcggtcttcgtagttggcaatcgccaggtagcgatacatctcttctacttgttcttccgtcaggccgacctcttcgatggcgcgggtgtcggtcacgccttccacggtctgggaacgcttgtagtggcgcatcgccatcatgcgcttcagggcacgcagcaccggaccggtatcgcccgcgctgagcatgtttgccaggtactgcaccggaatgcgcaggctttcgacagcaggcagcacgccgtcgctctgcggcaaaccacccgcgtccgcgtaggactgaatcggtgacagcggcggcacataccagaccatcggcagggtgcggtattccggatgcagcggcagggcaagcttccagtccatcgccattttgtaaaccggggaacgctgtgccgcgtcgatgacgttctgcggaataccctgtttcagcgcttcctcaatcaccgccggatcgttcgggttcaggaacacgtcgcactgacgctcgtacaggtcggtctcatgctcggtgctcgccgcctcttcaatgcggtccgcgtcatacagcagcacgccgagatagcggatgcgcccaacgcaggtttccgagcagacggtcggctggccggactcaatgcgcgggtagcagaagatgcacttctctgacttgccgctcttccagttgaagtagattttcttgtacgggcagccgctgatgcacagacgccagccgcggcatttgtcctggtcaatcagcacaatgccgtcctcttcgcgcttgtaaatcgcaccgctcgggcaggtggcaacgcaactggggttcagacagtgctcgcacaggcgcggcaggtacatcatgaaggtgttttcaaactggccgtacatctccttctggatcttctggaaattgcggtcgcgggcgcgtttttcgaactcgccgcccagcagctcttcccagttgggcccccattcgattttatccattcgcttgccgtcaatcagcgagcgcgggcgggcggtagggaggtgatcgccctctggcgcgcggtgcagatcctggtaatcgaaggtgaagggttcatagtaatcgtcaatctgcggcaggacggggttagcgaaaattttcgacagtacgcccattttgccgccgaggcgcggggtcagcttgccgtgaataccgcggatccagccgccttgccactcatcctgatcttcccagtttttcggatagccgatacccggtttggtttcgacgttattgaaccacgcgtactccatcccttcgcgcccggtccagacgttcttacaggtgaccgagcaggtgtggcagccaatgcatttatcgagattcagaaccatgccaacctgtgagcgtattttcattttttcgcctnnnnnnnnnnnnnnnnnnnnnnnnnnnnnnnnnnnnnnnnnnnnnnnnnnnnnnnnnnnnnnnnnnnnnnnnnnnnnnnnnnnnnnnnnnnnnnnnnnnnnnnnnnnnnnnnnnnnnnnnnnnnnnnnnnnnnnnnnnnnnnnnnnnnnnnnnnnnnnnnnnnnnnnnnnnnnnnnnnnnnnnnnnnnnnnnnnnnnnnnnnnnnnnnnnnnnnnnnnnnnnnnnnnnnnnnnnnnnnnnnnnnnnnnnnnnnnnnnnnnnnnnnnnnnnnnnnnnnnnnnnnnnnnnnnnnnnnnnnnnnnnnnnnnnnnnnnnnnnnnnnnnnnnnnnnnnnnnnnnnnnnnnnnnnnnnnnnnnnnnnnnnnnnnnnnnnnnnnnnnnnnnnnnnnnnnnnnnnnnnnnnnnnnnnnnnnnnnnnnnnnnnnnnnnnnnnnnnnnnnnnnnnnnnnnnnnnnnnnnnnnnnnnnnnnnnnnnnnnnnnnnnnnnnnnnnnnnnnnnnnnnnnnnnnnnnnnnnnnnnnnnnnnnnnnnnnnnnnnnnnnnnnnnnnnnnnnnnnnnnnnnnnnnnnnnnnnnnnnnnnnnnnnnnnnnnnnnnnnnnnnnnnnnnnnnnnnnnnnnnnnnnnnnnnnnnnnnnnnnnnnnnnnnnnnnnnnnnnnnnnnnnnnnnnnnnnnnnnnnnnnnnnnnnnnnnnnnnnnnnnnnnnnnnnnnnnnnnnnnnnnnnnnnnnnnnnnnnnnnnnnnnnnnnnnnnnnnnnnnnnnnnnnnnnnnnnnnnnnnnnnnnnnnnnnnnnnnnnnnnnnnnnnnnnnnnnnnnnnnnnnnnnnnnnnnnnnnnnnnnnnnnnnnnnnnnnnnnnnnnnnnnnnnnnnnnnnnnnnnnnnnnnnnnnnnnnnnnnnnnnnnnnnnnnnnnnnnnnnnnnnnnnnnnnnnnnnnnnnnnnnnnnnnnnnnnnnnnnnnnnnnnnnnnnnnnnnnnnnnnnnnnnnnnnnnnnnnnnnnnnnnnnnnnnnnnnnnnnnnnnnnnnnnnnnnnnnnnnnnnnnnnnnnnnnnnnnnnnnnnnnnnnnnnnnnnnnnnnnnnnnnnnnnnnnnnnnnnnnnnnnnnnnnnnnnnnnnnnnnnnnnnnncggcggacggttccagtccagcgcgaaggccagcggcagccagccggtttgcgggcgcagcttttcctggccgacatagtgcgaccagccgccgccgctctgcccgacgcagccgcagaagaccagcatgttgatcatcccgcggtagttcatgtccatgtggtaccagtggttcacaccggccccgagaatgatcatcgaacgaccgtgagttttgtgcgccgtgtcggcaaattcacgggcgattttttctatcagataagcggggacgccggtaatttgttcgccccaggccggggtgtaggcttttatctcggcgtagtttgtcgccgcgttactgtcttccagaccgcgatcgaggccgtagtttgcgagcaccagatcgtacacgctaaccacgcgtctctggctgccgtcggccagcgtcagggttttactcggtactcggcgcgtcagcaccggctcctgcttcacgctgcggaaatgcggattctcgttgcccccgaagtaagggaaggccacgtctgccacgctgtcgtgggtgatgagcagggaaagcgtcagctcggtttcctgtcctgctgccagcgactccaggttccatttgcctttttcaccccagcggaagccgatggaaccattcggcgccaccagatttccggccacgtcaaaggcgatggttttccactccggattattggtttcacccagcccgtcggccagatccgacgcgcgcagcatgcggcccggcaccacgcgaccgtcagcctgttcatccagcaggaccagcatcggcatgtcggtgtagcggcggcaatagttgaggaagtactcgctcgggttatcgaggtggaactctttaaggatcacatggcccatcgccatggcaagggcgctgtcggtaccctgtttgggggccagccactggtcgctgagcttcgccacctccgagaagtccggcgtaatggcgacggtcttggtgcctttgtaacgcacttcggtaaaaaagtgggcgtccggggtgcgcgtttgcggcacgttcgagccccaggcaatgatatagctggagttgtaccagtccgccgattccggcacgtcggtctgttcgccccaggtcatcggcgacgccggaggcagatcgcaataccagtcatagaagctcaggcaggtgccgccgagcagggagagatagcgcgtaccggcggcataagagaccatcgacatggccgggatgggggaaaaaccggccacccgatccgggccgtagtttttgatggtccagacgttggcggcagcaatcagctggttaagctctttccagtttgagcggataaaaccgccttttccgcgcgctttcctgtagctctgcgctttctgcggatcgttctggatggcatcccaggccagcaccggatcggtatgctgcgccagcgcctctcgccagagttcgatcagcctgcggcgtaccagcgggtacttgagacggttggcgctgtagagataccaggagtagcttgcgccacgcgggcagccgcgcggttcgtggttaggcagatcagggcgggtgcgcgggtagtcggtctgctgggtttcccaggttaccaggccatttttgacataaatcttccagctacaggagccggtgcagttaacgccgtgggtggatcgcacaattttatcgaactgccagcgctgacggtagctgtcctcccagtcgcggttggtgtggtacacctgcccgtgcccatcggcgaaactgtcgccttttgttttgaagtaacggaagcggtccaacagtttgctcatgacatttctcctgcttcgatagcatggccggagggtgagacatcacgctccggcgaagaggtagttattatttttgtgaggatttgcggccgtacaccagccaggtgacgagcacgcagacgatgtaaaacacgaggaagactttcatggcgcccaccggggtaccggtcatcgccagggatgtgccaaaggctttgggaataaagaacccgcctaccgcaccgatggcagagataaagcccagcgcggcagccgtttcggtcaccgcttcatgctgtgcctgttcgtcgctcccgccctgttttttcacgcggtcgagggtgatttggcgaaagataatcgcgatcatctggaaggtcgagccgctgcccaggcctgcggtgaggaacaggcccataaagaccagatagaaggccataaaactgcctgaaccagacccggggagcgtcaggaaaatcagggcgctaaagatggccataaaaacgaagttgatcagcgtcacccgtacgccgcccagcctgtctgaaatcattccgccagccgaacgcgccagagcgccgatcagcgggccaaagaaggcgaggtggaggatatttacgtccggaaactgggttttcgacagcatagcaaagcctgccgagaaaccgataaacgagccgaaggttgccagataaagcaggctcagcagccagaggtgaaagcgcttaagcaccggaagctggctggcaatggacgctttcgagctggcgatgtcgttcatgccaaaaaacgccgcaagggtagcaagaatcagcagcggcgcccagatccacgccgcgttcgccagccacatcgtcgagccatcctcctgggggacgccgtgaacgccgaggaaggtaaacatcggcagaaaaatcaccagcggcgcaaccagctgcatcacgctcacgcccaggttacccagcccgccgttaatgcccagcgcgctgccctgtctggctttcgggaagaagaagctgatgtttcccatgctggaagcgaagttggcgccggcaaaaccgcacagcagtgcgatgatgataaagacccagtaaggcgtggcggtattctggatggcgatcccaagccagacacagggtacgaccaggataacggtacttaacacggtccagtaacgtccgccaaatatcggcaccataaaagagtaggggacacgcaatatcgcgccggaaagagaaggtaatgccgttagcataaaaagctgatcggtgctgaaattaaatccgaccttattaagatttaccgcaatagcgctaaacaacatccagacacaaaacgcgagaagcaaacacgccacggaaatccacaggtttcttcgtgcgatatgtttccctttattctcccaaaattgcgcgttttccggtttccagttactcaacagatgctgattactcttctcgctttgatgtgacatatcaccctcttgcttaccaaaatggagagaaaaaagaagtaaaaacagaaagatacctgtcggcagtttgtagaaattattggatgttatgggatacatctgaaaggatagataaaaaagcgaatccctgagtttggaatgggaatcagggctcgctttatgtgttactaattgtaactatttgcggtaattaataccccgatgggagtattaaaacaattcgagggagataagtttatccagatgcttattaaatgccgcgtcgtccatttcaggcatatttaatacgtatatgccatccaggccacataccagaccaattaaacgccaggcgatattttccggctggtcagcaagcgtaaaggcgttggcctccgccccggcgcggataatcgcgaccgtttcctggtgccacatctccatggtcaaaacgtaggcgcctttgatatcgctatcccggctggcgagaatttgtgcctcccgccacagtcgaatgtagggctcaaacccgccgtcatcgctgccgagcatggcatgcaggcgctcgcgccagccggcgttttcgccaacgatttcagcatccagcaaatcgcggatcagccggacaaacgccagcgacttaagctcgcccgccgacgcaaagtggtgatgcacctgcccggtggcgacgcccgcttcggtggcgatgcggcgcacggtcatcgcagcgaatccttcggtcagcgccacgcgcatcgcggcctggaggatctcttcccgccgctcgtccttgctcagataacgcataatttctcactctcaatggcaacgaaacgagtgtaacaaagagctggacgagtgttcaactttacgtaggatcgcattctggacatgtgtccagtttttaactgaaaaggaaatttatgtttcgtcagtggttagcgttagtgattatcgtgctggtgtatatcccggtggcgattgacgcgacggtgctgcacgtggcggcgccaacattgagcatgacgctgggtgccagcggcaacgaattgctgtggattattgatatttactcgctggtgatggcgggaatggtgctgccgatgggcgcgctgggcgatcgcataggttttaagcgcctgctgatgatcggcagcgtgctgtttggcctgtcatcgttagcggcggcttttgcgccgtccgcgggctggctgattgccgcccgcgcgtcgctggcgattggcgcggcgatgatcattccggctacgcttgcagggatccgcaccctgtttattgacgtgcggcaccgtaatatcgccctcggcgtctgggctgccgttgggtcgggcggcgcggcgtttggcccgctgattggcggcatgctgctggagcacttttactgggggtcggtgttcctgattaacgtgccgatcgtgctgatcgtggtttcgcttgctgcgcgctttgtgcctgctcagcaggggcggcccgagcagccgctcaatatcagccatgccattatgctgattgtggcgattttactgctggtctatagcgccaaaaccgccctgaaaggggtgctgtcgccgtggatggtgacctgtacgctgcttaccggagcggtaatgctgtttatcttcgtccgtatccagctacgcgcgcgcgtgccgatgatcgacatgcgcctgttttgccatcgcattattttaagcggcgtggtcatggcgatgaccgccatgattgcgctggtgggctttgaactgctgatggcgcaggagttgcagttcgtgcatggttttacgccgtttgaagcagggatatttatgctgccggtgatggtggcgagcggatttagcgggccgatcgcgggtgtgctggtcgggcgtctggggctgcgcattgtcgcggccggaggcatggggcttagcgcggtcagttttatcggcctgtcgacgctcgatttcagcacccaacagtggcaggcgtggagcctgatggtgctgttgggcttcagtgccgccagcgcactgctggcatcgacgtcagcgatcatggctgccgcgccgaaagagaaagcggccgccgcaggcgcgatcgaaaccatgtcctacgagctgggtgctggtctgggtatcgccattttcggtctgctgttaacccgcagcttttcggcgtctattgtactgccgcaggggctgagcgcgtcgctgaccgataaagcctcgtcgtccatcggtgaagcgatgaaggtggcgcaggagctgacgccgtcgctggccgagccggtgatgacggcggcgaaaaccgcgttcatcacctcgcacagcgtggccctgggcagtgcgggaggcatgctgctgattctggcggtcgggatctggtttagtctggcgaaggtcggagggcagcagtaataaaaaaggccagccgcgagggctggccttttgaactaacagatcttagaactggtaggtcagacctacagctacgatgttgtcggtagccactttggcatctttggtgaactggctgtcatccacgaggttgattttgtaatcaacataggtggacatgtttttgttgaagtagtagctcgcgccaacgtcaacgtattcaaccaggtcctggtcgccataagaaccgatgtctttacctttggatttcaggtaagcgatggacggacgcagaccgaagtcgaactggtactgagccacaacttcgaagttctgcgctttgttggcaacgtgaccgttaccgaacgccgtcatgttgcgggtttcagagtaggtggttgccaggtagatgttgttcgcatcgtacttcaggccagcagcccagacttctgcgttttcgccaccggcgttcaggttgcttgcagcacgaacctgacggtcggtacggtcagatttcgcgtaggtcgcacccacaccgaagccgtcgaattcataggtagaagacagaccccagccgtcaccgttggattcggtgatatcgtcacggtcgtttttaccctggtactgagcagccacgttcaggccgtcaaccagaccaaagaagtcggtgttacggtaggttgcaacgccagtggtacggccggtcatgaagccgtcagtctgcgtccaggtatcgccaccgaactctggcagaacgtcagtccacgcgccgatgtcataagccacaccgtagttacgaccgtagtcgaaggaaccgaattcatcgaatttcagaccagcgtaagccagacgggttttgttgccgtcggaaccttgagcttcagagcgattgcccttgaactcatattcccactggccgtatccggtcagctgatcgttgatctgagtttcacctttgaagcccagacgaacatacgttttgtcgccgtcgctaccagcatcatcagaaaaatagtgcagaccagtaactttgccgtacagatccagtttgttaccgtctttgttaaaaacttcagccgcgttaacaacgccagctgccaacatggaagtcactgccactgcaactaatttaagtttcatcttaaataatccttataattttatttaggtatttcctaagccacctgagcgatttttaaacgaggcttatcgtcaatggcagactatttttaaaattccgtagactgctttcaataataagtttcaaaatattaaagataatttcaattagtgtgatcctgatcggataaattgcccttaaatcggccagttaggttaatatatagacataaagtgattattaaccaatcaagataatatggctgtgaatagttgtcggacgttttagttttttggtgggattaaaagggtttggcagggaatgtcaaagcatgtggcaggataaccttttttaaaacagttgattataaatttctcggaaaaccagaaccttttttttaagagaaatattcagaaataaactattgcactttgtgctatatagcgcgggaatattggcgctgaattaattacctacgttgtcagtttatgtcaatttccacaacaactctggctttttgacagcactcaatacagaaatttaattactctctaatgttacgaattatattcgagggtgtgatcacatattaaaatattgttaatattttgccgggtatattcggtacccggcaaaaataaaaatgctatttgcgggtggcataccagcacagtaacgatccggcgcacaccatcaatgccccttgccagaatgagagtgaaagcggagaactcagcagaatagccgccagtgcggcggaaagaactggcgtgaaataagagacagccgcaagcaccgtgacgttaccgtgaagaataccgatattccaggcggcgtagccaaagccaagcgcaaccccacacatcaatagcttcaccacaaccgggacgctgaacaccatttcgggctgatcgctgacggcatatttgacccacaggctcagggcggtcagcaggacgaaaagggtaatgccattttgccctttggcatatttgctggtgacggtgcagtaggcggcccagataaaagcgccagcaaacgccagcccataacttagcggactggaaacgacgttctgcatgatgtcattcagttgcagaccgttttcgccacctaaaacccagcacacccccaacagcgagatgagaagcccagggatcacccacagggtggttttttgcccgttgaacaaaatcgcgaacgcaatcgtcaggcttggccacagataattgaccataccgacttcaatcgcctgtgagcgcgtcgcggcataccccagcgacagggccaggcacatctcatagctgacaaacaggatgctgcccgcaatgagatagcgcgtggaaaaacgccgaagatcgggaaaacccaccgtcaccagacacaacagcccgctgacggtgtaaatcatcgccgcgccgcccaccgggcccagtccttcactgacgctgcggatgagacccaccatagtgctccacaacaatatggccgccaggcctgtcagcgttgctctttttctgtccattaccctgccagtcttctaaaaatcaaagggaaaacttatagcatctatttgcttcacctggcgaattttcaaagagcctgttaacccaaaaggattagcaaatcgtaccggcagtgactattaagggggcgaagtctggcgaccttgatttgacgcaaaaaaaacaggggctttgctgttagtttgcggcgcgaagtcttatcagataacgaggacagcaatggacgtcagccgcagacaattttttaaaatctgcgcgggcggtatggccggaacaacagccgcaatgctgggattcgctcccaaaatggtgctggctcaggcacgcaactataaactgctgcgcgcgaaagagatccgtaacacctgcacatactgctccgtgggttgtgggctattaatgtatagcctgggtgatggcgcaaagaacgccaaagaagcgatttatcatattgaaggggacccggaccatccggtgagccgcggggcgctttgcccgaaaggggcggggctgctggactacgtccacagtgaaaaccgtctgcgctacccggaatatcgtgcgccgggctctgacaattggcagcgtatctcctgggacgaagccttctcccgaattgcaaaactgatgaaagcggatcgcgacgccaactttattgagaagaacgagcagggcatcacggtaaaccgctggacctccaccgggatgctgtgtgcctctgcggcaagtaatgagaccggcatgctgacgcaaaaatttgtgcgctccctcggcatgctggcggttgataaccaggcgcgcgtctgacacggaccaacggtagcaagtcttgctccaacatttggtcgcggtgcgatgaccaaccactgggttgatatcaaaaacgctaacgtcgtggtggtaatgggcggtaacgccgctgaagcccatccggtgggattccgctgggcgatggaagcgaaaaacaacaacgatgcgacgctgattgtcgtcgatccacgctttacgcgtacggcatcggtggctgatatctatgcgccgatccgctccggtacggacatcacgttcctgtccggcgtgctgttgtacctgatcgaaaacaataagattaacgcggaatacgttaagcattacaccaatgccggcctgctggtaagggaagatttcgccttcgaagatggcctcttcagcggctatgacgcagagaaacgtcagtacgataaatcatcctggaactatcagttcgacgaaaacggctacgcgaaacgcgatgagaccctgagcgatccgcgctgcgtgtggaacttgctgaaacagcacgtttcccgctatacgccggacgtggtggaaaacatctgcggtacgccgaaagcggacttcctgaaagtatgtgaagtgctggcttccaccagtgccgccgacagaaccactacattcctgtacgcgctgggctggacgcagcataccgtgggcgcgcagaacatccgtaccatggcgatgatccagctgctgctcggcaacatggggatggccggtggcggcgtgaacgccctgcgcgggcactctaacattcagggcttaaccgacctcggcctgctgtcgaccagcctgccgggttacctgaccctgccgtccgagaagcagaccgactggcaaagctggcttgacgccaacacgccaaaagcgacgcgtccggaccaggtgaactactggagtaactatccgaagtttgccgtcagtctgatgaaatcgttctacggcgacgcggcgcagaaagagaatgactggggctttgagtggttgccgaaatgggaccaggcttacgatgtcatcaagtatttcaacatgatggataagggcgacgtcacgggttacatctgccagggctttaacccggtagcgtcattcccggataaaaacaaagtcgttcgcagcctgagcaagctgaagtacatggtggttatcgatccgctggtcaccgaaacgtctacgttctggcagaaccacggtgaatcaaacgatgtcgatccggcagcgattcagaccgaggtgttccgcctgccgtcgacctgctttgcggaagaggacggttcaattgccaactctggccgctggctacagtggcactggaaaggtcaggatgcgccgggcgaagcgcgtaatgacggcgaaattctggctgggatttaccatcgtctgcgcgagatgtaccgcgcagaaggcggcaaaggcgctgagccgctgctgaagatgagctggaactacaagcagccggatcatcctgagtccgaagaggtggcaaaagagaacaacggcgtggcgctggccgacctgtacgatgccaacggcaatctggtggcgaagaaaggacagctgctcaatagcttcgcgctgttgcgtgacgacggtaccacggcctcttcctgctggatctacaccggcagctggacggagcagggtaaccagatggccaatcgcgataacgccgatccgtcaggcctgggcaataccctgggctgggcatgggcgtggccgttgaaccgccgcgtactgtacaaccgtgcctccgcagacgtgaacggtaagccgtgggatccgaaacgcatgctgatcgagtggaacggcacgaagtggacggggaacgatatcccggacttcaacaccgccgcgccgggcagcaacaccgggccgtttatcatgcagccggaagggctgggacgtctgtttgctatcgacaaactggcggaagggccgttcccggaacactacgagccgatggaaacgccgctcggcactaacccgctgcacccgaatgtggtctccagtccggtggtacgcatctatgaagacgacgtgctgcgtttaggtaaaaaggacaagttcccttatgtcggcaccacctaccgcctgaccgagcatttccatacctggaccaagcacgcgcggcttaacnnnnnnnnnnnnnnnnnnnnnnnnnnnnnnnnnnnnnnnnnnnnnnnnnnnnnnnnnnnnnnnnnnnnnnnnnnnnnnnnnnnnnnnnnnnnnnnnnnnnnnnnnnnnnnnnnnnnnnnnnnnnnnnnnnnnnnnnnnnnnnnnnnnnnnnnnnnnnnnnnnnnnnnnnnnnnnnnnnnnnnnnnnnnnnnnnnnnnnnnnnnnnnnnnnnnnnnnnnnnnnnnnnnnnnnnnnnnnnnnnnnnnnnnnnnnnnnnnnnnnnnnnnnnnnnnnnnnnnnnnnnnnnnnnnnnnnnnnnnnnnnnnnnnnnnnnnnnnnnnnnnnnnnnnnnnnnnnnnnnnnnnnnnnnnnnnnnnnnnnnnnnnnnnnnnnnnnnnnnnnnnnnnnnnnnnnnnnnnnnnnnnnnnnnnnnnnnnnnnnnnnnnnnnnnnngcgaaaggcattgccaacggcgatcgcgtgaaggtcagcagcaagcgcggctttattcgcgcggtggcggtggtcacccgtcgtctgcaaacgctgaacgtgcatggccagcaggtggaaaccgtcggtataccactgcactggggctttgaaggggtagcgcagaaaggctacatcgccaataccctgacgccaaacgtcggcgattccaactcgcaaacgccggagtataaagcgtttctggtcaacatcgagaaagcgtaaggagcgattaaatggcgatggaaacacaagacattattaaacgctccgcgaccaacccgataacgcccgcgcctcgtgcgcgggattacaaggcagaagtcgccaagttgatcgatgtctcctcctgcgtgggctgtaaggcctgccaggtggcctgctcggagtggaacgatattcgcgacgaggtggggcactgcgttggggtctatgacaatcctgctgatctgagcgccaagtcctggacggtgatgcgctttagcgaaaccgaccagaatggcaagctggagtggctgatccgtaaagacggctgtatgcactgtgaagatccgggctgcctgaaggcatgcccgtctgccggggcaatcattcagtacgccaacgggatcgtcgacttccagcaggataactgcatcggctgcggttactgtattgcaggttgtccgtttaatatcccgcgcctcaataaagaggataaccgggtctataaatgcacgctgtgcgtcgatcgcgtcagcgtcggccaggagcctgcctgcgtgaagacctgtcctaccggggcgatccacttcggtaccaaaaaagagatgctggacgtggcacagcagcgggtggataagctcaaagcgcgcggctatgacaaggccgggatttataacccgcagggtgtcggcggtacgcacgtcatgtatgttctgcaccacaatgaccagccggagctgtatcacaatctgccgaaagatccggcgatagatacctcgatcaatctctggaaaggggcgcttaagccgctctcagcggcgggctttatcgccacctttgccgggctgatttatcactacatcggtatcgggccgaataaagaggtggatgacgacgaggaggagcatcatgagtaagtcgaaaatgatagtgcgcacaaaatttgtcgatcgcgcctgtcactggacggtggtcatctgcttcttcctggtggcggtatccggcatttcgttctttttcccgacgctacagtggctcacggaaaccttcgggacaccgcagatggggcgcattctgcatccgttcttcggcgtgctgattttcgtggtgctgatgtttatgttcgtgcgtttcgttcatcacaacatccctgacaagcaggatattccctggattaaagggattgttgaggttctgaaaggcaacgagcataaagtcgcgaaggtgggcaaatacaacgccgggcagaagatgatgttctggaccatcatgagcatgattttcgtgctgctggtgaccggagtgattatctggcgtccgtattttgcccaatatttcccgatccaggtggtgcgctacgcactgctgatccacgcgacctcggccattattctgatccacgccatcctgatccatatgtatatggccttctgggtgaaaggatcgattaaaggcatgattgaagggaaggtgagtcgccgctgggcgcaaaaacaccatccgcgctggtatcgggacgttgagcgacttgaagcgcaaaaagagagttcggaagggttgaagtaaaccttgcgccgtcggcattgtccggcggcgctgcacttgcgcgggcaggaataactgcctggcaggctggcgtcatgtgttagtcaataagcgatcaattgctgctataacatcctgacgagcgttacgtaaattacaaacaaagtcttttggattaattttctggttattaatattggttatcattggcgaataaatcagaaaggtttcaaattcaatatttactcctggagccagctggctctgccatagcggtagcctgttatttctcgcgaggggtacaatgacgcgagtggggagatcgtcataataatcatcctggataagcatataataaggaagctggtcccgcgttgccgcagacgtattacgataaacattaaattgtctcagcattaaagtaccctgaaaaactcatcatcagtgatagttccatgtttctccacaaactcattcattgctcgtataaatgcacgatccgctgctgatagctgatgtgatggtgtcgagcctggcttagcatgggttgtaggctttgttgctgctttaggtctggaaggggtcgattctgccgtgcgtttcatcggtttctcctttgttggtgcggtcattatcaaccgcagccaacaaaaaacaatactgtttcccctggtaatctacattatgcgagccgtcttccagtaatatcaaaattgctctgcaatataccggaagggatattttgtaggcttcactttgccgatcttgcgtttcggtaaatccaccttgtctacgtgaatttctttataggggatctgggaaagcagatgcgaaataatattcagccgcaccctttttttatcttctgagcgcgccacaaaccacggtgcccaggcggtgtcggtcgctttaaacatcgcgtcgcgggcgagggtatattcatcccacagattgaaagatttaatatccattggagaaagcttccagatcttgcgaccatcattgatgcgatcgcgcaggcgtcgctcctgctcttttggcgttacttcaagccagtatttcaacaaaatgatcccggcatcgaccatcgctttttccattaccggcgttccatcaagaaatttttcggcctgctcttcggtacagaaacccatgactctttccacgcccgcgcggttgtaccagctgcggtcaaaaataacgatttccccggcagagggcagatggggaacgtaacgctgaaaatagagctgacttttctctttatcggtgggggccggtaacgcaacaacgcgaaacacccgagggctgacgcgttcggtgatggctttgatagcgccgcctttaccggcgccgtctcgcccttcaaaaacaatacagacctttaaccctttggcgaccacccattgctggagcttaaccagttcaacatggaggcggcgaagctcttgctcgtacgctttagttttgagcggcgcgtttttaacgacatcatcaacaacatgggttttcttcttactgaccatggtggttctccctttgtatccggtcgcgggatcgaggccgtactaagagtgtaatcggcctgaatgaatggattaatgtgtcagaaatctgatttgaactggttcaccatacaagtttaatcaataatgcacgctgcatattttttaacagtggtcgcggtatgaaaaagacaattttttcgttagcactgggtacctttggcctggggatggctgagtttggcattatgggcgtgctgaccgagctggctcatgatacgggcatttcgattccctccgccggaaatatgatttcgttttacgcttttggcgtggtgatcggcgcgccgattgtggcgctgttctccagcaaattttcgctgaaaacaacgctgctgtttctggtggcgatgtgcgtcgtcggtaacgcgctctttaccttctctgactcctacgtgggactggcggcggggcgcttaatctctggtttcccgcatggcgcgattttcggagtgggggcgataatcctgtcaagaatcgcgccgccgggtaaagtgacggtcgctgtggccgggatgattgccgggatgaccgttgccaacctgcttggcgtgccgctcgggacgtggctgggacatgaatttaactggcgttacaccttctttttgattgcggtctttgacgcgctggtgatcctgtctgttctgctgtgggtgcctgacattcacgacacgacaaccacccggctggcagaacaattccacttcctgaagaaaccggaaccgtggctgatttttgccgctacgatgtttggcaatgccggggtgtttgcctggtttagcttcgtgaagccgtttatggtcaacgtatcaggcttttctgagggcgtcatgaccgcgatcatgatgctgatggggctgggcatggtgctgggaaatgtcttcagcggcaagctgtcgtcacgctttagcccgctgcgcattgctgccaccaccgacgtggtgattgtggcttcgctgctggcgttgtttgcctttggcgagcttaaaacagcttcactggtcatgggattcatctgttgcgccgggctgtttgcgctctctgcgccgctgcaaattctgctgctgcaaaatgcgaaaggcggcgagatgctgggggccgcaggcgggcaaatggcgtttaacctcggcagcgcaattggcgcctatttcggtggattgatgattacgctcggctttagctggagctatgtcacgctgccggccgcgattttatccttctctgcgatgacctctctgctgatgtatggttatttatgtgccaaaaagcgtcaggccaacgcaggtgcgctggcctgattgcacactttgcccgctggtcgcgggcgcagaagaggactaaacgaatttcgccagcgggtcagcggcggcaaaagcgaccgctttgtctgctgctggcgggtaaatcagttcgttggtgatggcgactttgatctttttgccttcctcgcgcacggatttaacgcgctgttcccagccctcggtgtataccgcgccccagccacccaaatccagacaggtgacgtagttcacctgacggtaagggtacggctccagatttaacaggctggccgccgcgttgtgtccggcgaatttcccaagctggatcgcgtgctggcaggtcatcagcgccgtgttgcccgcatcgtccgttttggcgtgcgccatatcacccgtcgcgtaaacctccggatgcgcaggaacctgcaacgtgtcgttgacgatcagccgtccctgagtatcgcgttccccatcaatttgcaggctgagggggttagcctctacccctgccgtccacactacagtggcgctggcaatgcgctctccgtttttcagcgtcacgccgctggcatcgatggcttctatttcactgtttaaacgccattcaacgccgagcacgttgcttgcttcttcaattgtgttacgcagcgcctcgctgtaacgcccgccgatggttgcacctctttcaactacgattaccttagtctccgtatcgacaccgaagcgagtgcggagtcgggcagggagttccgttgccagctcgatgccggtaaagccgccgccacacacgaccacggtattacgctccggggtggaggggcgcgaaaccagcgaatcaagatgctgctcgaataatctggcggagtcgagttggtcgatatcaaaggcgtattcagccagaccggcaacaggaggacgtttagtctggctaccggttgcgaggatcagacgttcccaggtgacgtcagcaatcgcgccgtttgaatcgcgatacaaaacggttttagacgaggtatcaatacgttgtgcttcgcccgcaataaaggcgatacccagctcagcaaacagttcggtcagcggcgcgaccatcgtcgacacgttctcttcataaaagcgtgggcgaacgcgcagctccgcaacaggggccagcacggcaatgctgaggctattgttacccgccagagcagaaaggcgcgcggcgctgaccgcagcccacataccggaaaacccactacccacaattaaaatctgctttttcatactcgatccttttgttcgtcaggctgtatgtctgacataactgccactatacttgtcggagttaactgcgacaacttctttctgagttaaaaatcgttataatgcagcgaacaatgacccggagtgagccatggcgttttacagttctggtgtggaatatggcattcatagcctgatgtgtatggtggatgcaaaaggcaatgagcgtgagatgagcgtccgggagatggccgccttgcagggcgtgccgtacgactatcttggaaagatcttcacccgtttatcacgggcggggctggtcatcagcaccgaaggcaaagggggaggattccggctggcgcgtccggcggagctgatcagcgtgctggacgtggcgcacgccatcgacggcgagaagaatatgtttgagtgtcgggaagtgcgtcagcgcctggcggtgtttgatgaaacgccacctgcctgggtctgtgacggcccgtgtggggtgcgctcggtcatggacagcgcgcagcagcggatggaagaggagttagggcgccataccatcctggatctggcgcggaagatgtatcgaaaagcgccggacacgttccagatcgaggttcaggaatggatttccgatcgccgttcgtccacatgaaaagccgggcagggcagagccgctacccggccaccgcggttaagaacgtaaatcaatcaccatacggccacggatctggccctgttccatctctttgaagatggcgttgatatcttccagtgggcgcattgtaactttgtttcgtaccttaccttctagccgcaaacnnnnnnnnnnnnnnnnnnnnnnnnnnnnnnnnnnnnnnnnnnnnnnnnnnnnnnnnnnnnnnnnnnnnnnnnnnnnnnnnnnnnnnnnnnnnnnnnnnnnnnnnnnnnnnnnnnnnnnnnnnnnnnnnnnnnnnnnnnnnnnnnnnnnnnnnnnnnnnnnnnnnnnnnnnnnnnnnnnnnnnnnnnnnnnnnnnnnnnnnnnnnnnnnnnnnnnnnnnnnnnnnnnnnnnnnnnnnnnnnnnnnnnnnnnnnnnnnnnnnnnnnnnnnnnnnnnnnnnnnnnnnnnnnnnnnnnnnnnnnnnnnnnnnnnnnnnnnnnnnnnnnnnnnnnnnnnnnnnnnnnnnnnnnnnnnnnnnnnnnnnnnnnnnnnnnnnnnnnnnnnnnnnnnnnnnnnnnnnnnnnnnnnnnnnnnnnnnnnnnnnnnnnnnnnnnnnnnnnnnnnnnnnnnnnnnnnnnnnnnnnnnnnnnnnnnnnnnnnnnnnnnnnnnnnnnnnnnnnnnnnnnnnnnnnnnnnnnnnnnnnnnnnnnnnnnnnnnnnnnnnnnnnnnnnnnnnnnnnnnnnnnnnnnnnnnnnnnnnnnnnnnnnnnnnnnnnnnnnnnnnnnnnnnnnnnnnnnnnnnnnnnnnnnnnnnnnnnnnnnnnnnnnnnnnnnnnnnnnnnnnnnnnnnnnnnnnnnnnnnnnnnnnnnnnnnnnnnnnnnnnnnnnnnnnnnnnnnnnnnnnnnnnnnnnnnnnnnnnnnnnnnnnnnnnnnnnnnnnnnnnnnnnnnnnnnnnnnnnnnnnnnnnnnncggtttttggtgttttggcttacgcgccaaatcctcttccagcagcgtttccagggcaaccaggcgttcgagcagatcgtcagacgctgaagagggtgccttcgatgcggccttcgacgcttcaggtacaaccggaccggtgtcctcacgcagacgctcaaacaccgcctccgcatcgtgccattcgctcagcctgccgtcctcaatcagccagaagcggttacagctctggctaattaactgacgatcgtggctcaccagcagcactccgccttcaaactgttgcagcgtttccgccagcgcctctttgccttccatgtccagatgattggtcggttcatccagcatcagcaggctataacgggcaagcgtcaggccgacgaacagcaggcgcgaacgttccccgccgctcagcgtactgactttttgcccgtgacgcgcccacgggaacccggcactgatgagcgccattttacgtgtctgcggatctggcgcgaaaggctccagcgcatcaagcagcgctgcatcatctggcaactggtgcagcgtctggtcgtagtagccgggtgagacgcgcggatgacgcttaagccgctcgtccgcgatctcgtcgcgaaaatgtcgccagataagcttcagcagcgacgattttccgcagccgttacgacccacaatcgccacgcgatcgccgctcttcagccgcgcgctgtcgagagtaaacaggtctggcagacccggcgccggggggacgccgaggtgagtcatttccagcaggcggtcggcgcgaagcgcgtccccgcgcagggttaaggtccacgggcttcccgccgtcagttccgtctgggtctctttcaggcgttcgacctgtttttccatctgcttagccttacgggagagatcttcgttgtcatagaccttgccccagttcgcgagacgccgtgcgctggccgtgacgcggtcgatctctttttgctctgccttatggcgcaacgcatcgctttcgtcttttgcgtcgagcgccagacgggcggcagtgcagggaagggcaaaggcgtgcagcgttttatcgcgcaggatccagctgccgttggttaccgcgtccagcagttgcctgtcgtgtgagaccagcacaaagctgccggaccagttttgtagaaactgctccagccacagcagggtcggcaggtcaaggtggttgctcggttcgtccagaagcagcagatccggatcgcttatcaacgctcgtgccagcagcaaccgcgtatgctggccgccgctcagcgtggcggaggttaacgccgtttcctgcgtcgtgaagcccattccggccagcagcgactcggctttccagcgcaaactgtcgcgctcaccgatcggcagctgcgccagcaccgcatccagcatggtcaggggatcaagagtctccggcagatgttgttccacgcgcgccagcaggcaatgccccgccagtgaaacggttccggcagcaggggactgcgttccgtcgaggattttaagcagcgtactttttccgcagccgttatcacccagcaggccgatgcgatcgccttttttcaacgtaaaggagagagagtcgaagagcgtgccgaacgccgtatcaacgcgtaaagaatgtgcagtgagtaaagtgctcattgttgcttacccaggagttacaggcatgtttatgcctcgtcaaacatcgctgacgataactcagtaagcccgagagaagggatttcaggggttggtgtcttcgctcaagcggaagttatcgcagcacgataccgataacgcttgagctggtgcgatcaccaaatgtatgtgaaacattgaaaatttcacagtacagcataattggcctccttatatattcagtaggttaatggatgaagggagtgtagcgggggaaaatgggtttggctagtgggaggtgccgtatattcccctcaccctaaccctcctccccaaaggggnnnnnnnnnnnnnnnnnnnnnnnnnnnnnnnnnnnnnnnnnnnnnnnnnnnnnnnnnnnnnnnnnnnnnnnnnnnnnnnnnnnnnnnnnnnnnnnnnnnnnnnnnnnnnnnnnnnnnnnnnnnnnnnnnnnnnnnnnnnnnnnnnnnnnnnnnnnnnnnnnnnnnnnnnnnnnnnnnnnnnnnnnnnnnnnnnnnnnnnnnnnnnnnnnnnnnnnnnnnnnnnnnnnnnnnnnnnnnnnnnnnnnnnnnnnnnnnnnnnnnnnnnnnnnnnnnnnnnnnnnnnnnnnnnnnnnnnnnnnnnnnnnnnnnnnnnnnnnnnnnnnnnnnnnnnnnnnnnnnnnnnnnnnnnnnnnnnnnnnnnnnnnnnnnnnnnnnnnnnnnnnnnnnnnnnnnnnnnnnnnnnnnnnnnnnnnnnnnnnnnnnnnnnnnnnnnnnnnnnnnnnnnnnnnnnnnnnnnnnnnnnnnnnnnnnnnnnnnnnnnnnnnnnnnnnnnnnnnnnnnnnnnnnnnnnnnnnnnnnnnnnnnnnnnnnnnnnnnnnnnnnnnnnnnnnnnnnnnnnnnnnnnnnnnnnnnnnnnnnnnnnnnnnnnnnnnnnnnnnnnnnnnnnnnnnnnnnnnnnnnnnnnnnnnnnnnnnnnnnnggctggtgaggggcaatgcttaaatagaagtacgacgatagctacggtattcaggcatccagaagttatcgtcaatcgcctgctgcaacgcatcggcagaggttttcaccgcgacgccttgctgctgcgccattttgcctaccgcgaaggcaattgcgcgggacactttttgaatgtctttcagctccggcagtaccaggccttcaccgttattcaccagcggtgagtgacctgccagcgtttcgctcgcggacatcagcatttcgtcggtgatgcgtgacgcgccggaggcgataacccccagaccaatacccgggaagatataggagttattgcactgtgcgatgggatagagtttgtccttccacagcaccggatcaaacgggctgccggtcgcgaccagtgccttaccttctgtccaggcgatgatatcctgcggcgttgcctccacgcgtgaagtcgggttagacagcggcatcacgatagggcgttcgcagtgcttgtgcatctcgcgaataatctcttccgtgaagaggccggtctgcccggatacgccgatcagaatgtccggcttcacgttgcgcaccacgtcaagaagcgagagcacttcgttatccgtatcccagtttttcaggttttcacgcttctgcaccagtttggtctggaacgggagcaggtttggcataccgtcggtcagcaggccaaaacggtccaccataaagacgcgggagcgagccagctcttcgcttaagccttcgcgctgggtctgggcaataatttgctcggcgatgccgcagcccgcggagcctgcacccaggaagacaattttctgatagctgagctggctgcctgccgcacggctcgcggcaatcagcgtccccactgtcactgccgcagtgccctgaatgtcatcgttgaacgagcagatctcatcgcggtagcggttcagcagcggcatggcgtttttctgcgcgaagtcttcgaactgcaacagcacgtccggccagcggtgcttcacggcctggatgaaatcatcaacaaactgatagtactcgtcgtcggtaatgcgcgggtgacgccagcccatgtacagcggatcattcagcagttgctggttgttggtccccacgtccagcaccaccggcagggtgtaggccgggctgatcccaccgcaggcggtatacagcgagagcttaccgatggggatccccatcccaccaatgccctggtcgccaaggcccagaatacgttcgccatcggttaccacgatcaccttgatgttgtgattaggcacgttttgcagaatgtcgtccatgttgtgacggttctgataggagatgaacacgccgcgggaacgacggtagatctctgagaagcgttcacacgccgcgccgacggttggggtgtaaatgacgggcatcatctcttcgagatggttctgcaccaggcggtagaagagggtttcgttggtgtcctggatattacgcaggtagatgtgcttatcgatttcggttttaaagccctgatactggatccaggcgcgttccgcctgttcttcaatggtttcaaccacttcaggcagcagacccagcaggttaaagctgctgcgctcttccatgctaaaggcgctgcctttgttcagaaggggaaactccagtaaaaccggaccggcgtaaggaatataaagggaacgatgttttttcagtttgttgtccatgtcactcactctttttaagaagatccgtccctgacactgctgtttgtcatctttctggcctgtgctacggggtgcggtcgggcggtattataaaggagctaaatattaattaccgcaacacataaacaaaaacaccaccggggtaaccgatggtgttgtggatttcgtactggaacttacttgcctgcctgacgtttcctgccggtggcgtgggtcacttgcgtttcgctcccctcttcaataaccactttgcgctggttagagagcttgtaattcagtcccagaatgtggcgtgcctgacggttcgatttcatattaactcctcaatcccgttgatagttttaaggacaagtttgctcacgcaaacgaaatgtaaccccttaggttgcagatccagcttagcaggtttttacaaaggtgcattttgcccgctaacgacatagttgatggtttgctggtagatgtcactgaggatgtcattgtctgtggcttccacccacctggtcagttccatcaaaatgtcatcttcggtaacaacaccgtgctccgcctgaagcccctgcgcaatcgcgttaacgagttcgggttgtgctgctgtggtatgtgccgggtaataagtaaacatgctgcctccgtgtcgttttctgtttaatgttacggcgtgcaaattcgtaattcgcattcagattggcaaatatttttgccgttgtggttcagattcgtcctggaaataaaaatatcatctcccgtagcacagaaataaaattcagggtttccagcggcgtaaatttgtcgttttttcataaggcatgggcgttggccaggaaatcaattctacaatgctgccccatggggtttgcccatagcagaaagcattaccttcaccttgctcattcggaaacgagagcggctttggcgcggtaaacatctccccgccggcagcggtgaaagcggctatcgccttattaaaatcgtcaacataaacagcaaaatgctggaggccaaagtcgctggcgcgggcgggcattccctgttcagggccatgcatttcgaaaagttctatgccgggtccgtggggcatgacgagcatgcgaatggcgtgaatttgtgtgccgggaaataattttaaggtgtgctgctgggcgggctgatcaatattatcggtttgcgcatcgacagaatgatataaaacctgagcgtcgaaagcgcgttcaaaaaatagggtggctttttcaatgtcgggcaccgtaataccgatatggtcgatgccccttactgacgatggcatagttaactcctgctataaaaaatttaaatatagcaggagataatcaggctattaccacttcatttcgccggtattcactttggcactcagttccagcgaactggcttccgccaggttcggccactgttttttcatcgtactgatgacgccggttgacgctttatgtgtcgtggagggcctgttcaaactgctgaagatagtgacgggtaaagtcgatagcgccggtacccgctggcggtgtcccaaggtagtggcccggaataacgcgttcgggcttaagggctgccatgctatccagcgtctgctgccactgtttgcggctttccggcgtttgggtatctgccgtccagacgtgaatgccccatgagacgcccgtgccgccgaggatggtttttgcggatgggatccagacatacgccgcatagctctcaggctcttcaatattcactctctcaccgtcaatcataaaggtggttgaggcaagcacttgcggcacatagagctgcgttggcgcgccgtctttcatctgtggcccccagaaggcgagcttcgcgtcttttgtggccttgatatggtccaccacctgttgcgtggcgacaactttggcattagggaaggctttcaccagcggttgcaggccgaaatagaaatccggatcgccggaagtgatcacgattttgttcagcgttttaccgctgtggcgaattttttctaccagcgcttcgccatctttcacgctgaactgggcgtcaaacagtaccgcctctttcgggccagacaccagggtggaagaaacggcaaaaatgcctttttcctgcgggttgaacgtatcaacggtcaacggcgcggcaaagacggccggagtgaaaagggttgtcagcaaagcaaggcgggcgatggtcatggtcatctctctgtttttcaggaaagtctctattgtacggatctcttcatttgccagaattcctgaaacaggagatgcttagtttcataaatcgagcaaatggaggtcaaaatggatcgcgttattgccgcccaggtgtacaaccgcatctgtgagctggggagtttaagcgcggcggcgcgggcgctggggatctctcgtccgatggtgagccgttatctggagcagatggagaagtgggccggggcgcggctggtgaaccgctccacccgcaagctgacgctgacggcggcgggagagaaggttctgcaaaagacacgcacgctctcgcaaatttctcaggaaattgaagatcagtcagtaaaggatttaccttcaggcacgcttcgtgtcgcttgcgcgcactttacggcgatgcagattatcgctccggtgctgcccgatctgttgcagcgttaccctcagctgcgcattgagctggatgttaacaaccatccgataagcctggtgggcgagcgaattgacgtggcgatccgcatcaccgataaccccgaaccgggcatgatcgcccgccggctgggagagtgtcggtccgtactttgcgcttcgccgcactaccttgccagccggggcgttccagagcagctggaggacttagcccggcacaactgcctgcattacagcttttttgccggtcagtcgtggcgttttttgacgcccgaaggggagccgatcacgacggcggtcagcggcaatctcagcgccagcatctcgtcactgctgatggaggcggcgataaaccactgtggtattgccatgctgcccgagcgcgaggcggacgcggcgctacggcagggcagcctggtgccggtgctcagcgcctttacgccaaaaccaatcggtatttttggtatttatcagtcgcgagactatcagcctgcggcgcagcgtgtgttcctcgacgcgctggcaaaccaccttgccacgcgctcggactaatctgtcttccctgcaaaatggattatgcgtcctatacttatccctttgtaagccaaaaggagagcaagaatgacgattcataagcacggttcagcacactggtctggcgacatcaaacgcggcaaagggacggtctcaacagaaagtggcgtccttaaccagcaaccttacggctttaacacccgcttcgagggcgaaaaagggaccaacccggaagagctgattggcgcagcgcacgcggcctgtttctctatggccctgtcgctaatgttgggcgaagcgggttataccgccgattccatcgataccacggcggatgtctcgctggataaaaccgacagtggttttgccatcagcaaagtggcgctgcaaagcaaggtgacggtaccgggtatcgatccgcagcagttcgacggcattattcagaaagcgaaggcgggttgtccggtgtcgcagctgttgaaagccgaaatcacgctggattacaaactgaactgatatctggccgggcaaatgcccggctaacctttcaccgccgcagggaagacctcggcaagccacgcaataaacactctcaggcgatgtgttaaatgccgactctgtggatagactacgtgaaaaggatacgccttaggacgccagtcgctcaggacctctaccagcgcgcccgtttccagatgcgttctcgcagcatagccaaacgtctgaataatccctaaacccgccagcgccgcggccaggtgtgcgttgctttcattgactccaagatggtgcggaacgctgatctccagcggttcaccccgatcgaggaaccgaaacgggaatgcgcgtccggtaacgggggaaaggtagctaatcagcttatggccgttgcgcagctcctgcggataggcagggatgccgtgagtcttaagatagcccggcgtcgcgcaggctatcatccgggcgtcaccgatatgccgggcgataagcgaagagtcatccagcgggccgccgcggatcacgcagtctacgtttccactgattaagtctaccggacggtcggctacccccaggttgatgcgcaggtccgggtagcgctgaaaaaaatccggcagcagggggatcaacacgtcccgggcggttgacccccccacgtcgatacgcaaatggcctttaggcgtgcagcacgatgcgcgaaaggcggtatcaatgtcctctatatcaattaatacccgcagcgctttctcgtagtattccatgccttctgccgtcgtgaccacccggcgcgtagtacgatgcagcagccgtgtttccaggtgcgcttcaagtgattttaccagcttactcagcgtagctatcggcatgttcagggagtctgccgctcgggtaaagcttccggattcaaccacccgcgtaaaggcgcgcattgccattagctgatccacacagatctcctctgattatttcnnnnnnnnnnnnnnnnnnnnnnnnnnnnnnnnnnnnnnnnnnnnnnnnnnnnnnnnnnnnnnnnnnnnnnnnnnnnnnnnnnnnnnnnnnnnnnnnnnnnnnnnnnnnnnnnnnnnnnnnnnnnnnnnnnnnnnnnnnnnnnnnnnnnnnnnnnnnnnnnnnnnnnnnnnnnnnnnnnnnnnnnnnnnnnnnnnnnnnnnnnnnnnnnnnnnnnnnnnnnnnnnnnnnnnnnnnnnnnnnnnnnnnnnnnnnnnnnnnnnnnnnnnnnnnnnnnnnnnnnnnnnnnnnnnnnnnnnnnnnnnnnnnnnnnnnnnnnnnnnnnnnnnnnnnnnnnnnnnngtctgcctgacgcgggcaaacgctcctcttttacatcacaacagaaggttatgagtatgaatacaacgcttgcaggaaaaatcgctctggtgaccggcggcagcaccggtattggtctcgcaacggcacaggagctggcggcgcagggagcgaaggtctatatcaccggacgtcgtcaggccgaactggatgctgcgcgggcagacattggcgccgcggcggtagctatccgcgcggacgtctccagaatggccgatctggatgcggtttacgcgcagattgctaaagaagagggacaactcgatattctgttcgccaacgccgggggcggcgacatgctgccgctgggcgccatcaccgaggagcagtttgaccggatttttgccaccaacgtgcgcggcgtgctgtttaccgtccagaaagcgctgccgctgctctcctctggttcatccattatcctcaccggatcgacggtttcaattaaggggacggcgaattttagcgtctacagcgccagtaaagccgccgtgcgtaactttgcccgctcctgggcgctggacttacagggccgcgggatacgcgtcaacgtcgtcagccctggccccgtgaaaacgcccggtcttggcgatctggttcccgaagaacagcgtcagggattatacgatgcgctggcggcccaggtgccgctgggtcgcctgggcgcgccgggcgaagtcggaaaagccgtggcgtttctggcgtccgatgccgccagctttataaacgccacggagctgtttgtcgatggcgggatggcgcaaatctagcggttacgccagcagcgtacgcttcggtctccggctgcgggctgaagcggctgcggccgttcgcatccttcagctgccagcgggcagcggtcgcggaagtagcagccatcgggcaggcggcgattaccggggagatcggttttgcgtaatgccagatcttcgtccagcggttctccggtacggggaacggagtcaagcagcagctgcgtatacggatgccgtggcttgcccagcacctggtccgccggacccagctccacgatctgccccagatacattaccgccacccggtcgctcatgtgccggaccaccgagacgttgtgcgagatcagcacgtaggtcagatttcgctgctgttgcagggcaaccagcaaattgaggatctgcgcctggacggaaatatccagcgcgctggtgggttcatccagcacgatgatgtccggatccgaagagagcgcccgggcaatagcgatgcgctggcgctgtccacccgaaaacgcatgcggcaggcggtcaagatattccgcccgaatgcccacctgctgcgccagcgtctcagccagctgacgacgctcccgttcgctgcggcgttgctgtatccacaccggctcggtgatgatgcgccagacgggtaaacgcggatcgagggacgagagtgggtcctgaaataccatctgcataccacctgccgcattcgcgcgctgacaggcaccggtactcggtttgagcatgcccatcagcagctgcgccagcgtgctctttccgcaaccagattcccccacaacgcccagcgtttcgccgcgatggatccggagatccatgccgttgagggcgtgtacctgctccgtcacacgccccagccagtttttgcgcgcaggaaaattcacatgcacgctatccagttccagcagtacctcagacatggcgtgtctcctgttgtgggtaccagcaggcagcctgctggccttctgcgcccgtggaaattaagcgcggcgtttcgctgcatttcgctccggcagcaaaacagcgctcgcgaaaagcacatccgcgcgggaggtggctgaggttaggcaccgtgccgggaatggccggaaggatctcgcgcggttcaccattttccggggcacaccgcagcaggccaatcgaataggggtgtacaggatggtggatcaaagtctgcgtgatgccgctttcgatcacgctgcccgcgtacataacgtacatccggtcacaaagctgcgataccaccgccatatcgtgactgataaacagcaccgacgtcccgctggcgcgcgctttgtgtttcagcagacgcagcacctgacgctgaacggtcacgtccagcgcggtggtcggctcatcggcaatgatcagctccggctcgcaggagaaggcaagggcgatcatcacccgctggcgcatgccgccagaaagctcaaacggatagcgatccatcacctgcgccgcatccgggatttgcatctcgcccagcagggcgatcgccttctgctgcgcgtcgcgacgggaaagcgactgatgctggcggatcacctccaccatctgcctgccaatccggcgcgtggggttgagcgccgtcatcggttcctgaaaaatcatcgccaccctggcgccgcgccactgacgaagctgtttttccgacgcattcaggacatcttccccgagcagcgtgacccggccatggtgaacatggtaactgccttccggcagcaggcgcatcgccagcattgcagtgaccgattttcccgagccagactcgcccaccacgccgacaatttcaccccggccaatctccagcgaaacgtgattgagcgcgtggacgtcaccgcgaaaaatggggaagctcaggtgcaaatcttcaattgataatacggaatcactcatgactgcttccctcctgatttgggatccagcaggtcgcgaagaccatcgccaaacagattaaacccaactgccgtgatcagaattgccgcccccggaaacgcgcagtaccaccactggtcaagcacgtagttacgccccacggccaccatcgcgccccattcggcggtgggttgctgcgcgcctaatccaataaagcccagcgtggcggccatcagaatggcgctgccgatatccagcgatgcttgaacgatcagcggcggcagggcgttacgcaggatatgccagctgatcaggtgccagcgcgatgcgccaaaggtgcgggcggcctgtacgtaggtgaactggcgcaccaccagcgtttgcccgcgtgccagccgcacgtaaaacggaatgcgtacaatcgcaatcgccagcnnnnnnnnnnnnnnnnnnnnnnnnnnnnnnnnnnnnnnnnnnnnnnnnnnnnnnnnnnnnnnnnnnnnnnnnnnnnnnnnnnnnnnnnnnnnnnnnnnnnnnnnnnnnnnnnnnnnnnnnnnnnnnnnnnnnnnnnnnnnnnnnnnnnnnnnnnnnnnnnnnnnnnnnnnnnnnnnnnnnnnnnnnnnnnnnnnnnnnnnnnnnnnnnnnnnnnnnnnnnnnnnnnnnnnnnnnnnnnnnnnnnnnnnnnnnnnnnnnnnnnnnnnnnnnnnnnnnnnnnnnnnnnnnnnnnnnnnnnnnnnnnnnnnnnnnnnnnnnnnnnnnnnnnnnnnnnnnnnnnnnnnnnnnnnnnnnnnnnnnnnnnnnnnnnnnnnnnnnnnnnnnnnnnnnnnnnnnnnnnnnnnnnnnnnnnnnnnnnnnnnnnnnnnnnnnnnnnnnnnnnnnnnnnnnnnnnnnnnnnnnnnnnnnnnnnnnnnnnnnnnnccgcgcccgccgagtacgccggacaaacagccgagcagagaaccgatgccgcccgcaatcaccaccaccgccagccccgccgtgatggactgctggctgcccaccagcacgcgactgaacagatcccggcctacctcatcggtgccaaaccagtgctgggctgaaggcgcctgcaatcgcgcggtcagatccagcgcgttcggatcgtgcgggactatccacggcgagaccaccatcatcagcagcatcacgatcataatcaccccgccgatcagcgtgagcgggcttttgcgtaacatccagaacagctttgcccagttgatgcgctgtttggcggtgctgacggggacgggcgtttcctgagttaacatcattcggcacctccgcgcccgattcgcgggtcgatccacagatacagcagatccaccaccagattgacgaagacataggccagcgataccacgaccgcgaagcccatgacggcagggaagtccagcgcctgaatggaggtcaccacccaggctcccattcccggccaggcaaacacggtttcggtaaggactgccccatacagcagatcgcccagcgccagcccgagcacggtaatggaggggatcatggcgttgggtaaggcgtagcgcagcacgatgtaccagcccggcaacccgctcgcgcgggcggtacgaatataatcctcgctcagctgctccagcatcgcggaacgcacctgacgcgccacaatacccagatgcacaaaggccagggtcagggagggtagaatcaggtgctgtagggcgttgaaaaacacctccccgttgccttccagcagggcgtccagcagataaaagccggtaacttgggcaggcggatcgagccagtcgtccagcctgccgccgccgggcagaatttgcagttgcccgtagaacagaacgattacccccagtcccagccagaaggcaggcgtcgagatgcccgtcatcgccatcagtcgcaccaggtgatccagccagcggttacggtacaccgccgataaaatgcccagcggtacgccaatcaccagcgccagcagcaaagagcagaaggccagttccagcgtggcggggaaaaaggctttcaaatcttccgcaacggggcgaccggtgcgaatggaggtgcccagatcgccgtgcgccagcgcctctacatagcggccaaactgaatatagagcggttgatccagccccagctgctggcggatgccctgcacgatttcatcgctggcgcggtcaccggccagcaggcgggccggatcgccggggatcaggtgtgaaataataaaagtaataatacagacaccggccaccaccaggattaacccccagcagcgctggcgcacgatgctccagaacgtcatacacttccccccggcgtgggccgttacttactcatggtggcgatgttaaagacctgctcaagcatcggattaaaggtgaagcctttgacctctttgttcatcgccagctggtagttcttctggaacagataaacgtaagccgcctcgtcaatcaccactttctgcgcctgctggtaatctttggtgcgttccgcctgatcggtggttttcagtgccgcctgcaacaatgcatcgacctctttgttctcatagaatgagcggttacccggcagcccttttttgtccgattcgaaccagtagttcatgaacatgtacgggtcagcgaagtccgggctccagttaccaatcgcaatgtcataatcacctttgccgacgcggtcgcgcatggtggcgttcgccagtttctcgagcttgacgttaatccccagcttgcccaggctcgcctgcgtggagagggcgataggctcccagttcgggtcgttatcggagtagaggaacgtcaggctggccggtttatcgttgactttctccagcgccgctttggccttagcctcgtcaaagctgtactgcatggcgttcgtatcgaagccccacatgccctccgggatcgggccgcgcatctgcttgccgttcccgctgagaatgcctttcaccatcccctgataatcggtggcccaggagaccgcgcggcgcaaatccacctgattcatcggaggcttactgttgttcagatagaggtaggtcacccgcagggacgggtattccgccacggccactttgccttcctgcttcagagcggcaagctgatccaccggcagggcgtcggcgatatccagatcgccacgggaaagttgcaggcgacgcgaggcgctttcaccgataatcttcaccgagacgcgcttgaagtgcggcttttcacccggccagtgtgggttgggcaccatcaccagctgctgacctttccgccagcttttcagcataaacggtccggaacccgcggtgttttgcgccaggaaaccgcgcgcgtcgtcggcggcattggctttcaggaccgccgggttgacgatcgacgcgccgtcattggccagcgtgtagaggaacggggcgaacggctggctgagggtgaatttcaccgtatgctcatccaccgcgtccactttcaaatctttcgggaacgcttcggaaggtccctgattaattttcagcagacgttcaaacgacagcttgaccgcttcggcggtcaccggcgtgccgtccgaaaattttgcattatctgccagggtgaacgtccactctttctggtcgtcagacgccttccagcccgtcgacagatcgccttccacctccgtggtgccaggcttgtatttcaccagacgctggtacgaggggtaggtcaccgtccagtcgttgttatcgatagtgaccgccggatccagcgtttgcggatcggcagctttcccaatcaccagcatatcttttggcaccgccgccagcgcgagaggggcgctcagggcgagcgtagcggcaatcagggttgtaagcagcgtagttttcatggccgggctccagaattagagtgagtatgtggtcggataacaggcgaactggtcatctaacagcgggtagctggcggcgttcggcagttcgaaatgccaccactcgctgctgatgcccacaaaaccgccgccgtacatcacggcgttcaggagcagacgatttcgctgcgcctcgggcggaacggaagggtgccaggcatgagaacggtcgtgcatttcgtcaaacccggcgcccatatccagcacgttgtcgtgttcatccatcagcgtgacgtcaatggcggtgccccggctgtggttagagccaattgcgacatccaccacgtattccggattggggcaggcatcccagagttgcgactgcgcctgctgggggcggtaggcgtcgtaaaccaccagcttcagaccggccagcgcggcgatgctgatcgctttcgccagcgcggtggcggcatccgtatgcaacaggcacgcggcgtgctggtagatcgggcggccagtgatgttatcggcggtcgcgtatttcagatcgatatgcagcgtgggaaaggttttcgccacatcaatcagttgactctcttcaggcatagctccgctcctttagcgttcaaattgaccaaactcttgctgtagttgtcggttgattgccagacgttccggcagcgcatcgcccagcgcctccacaacgcccgacagcagcaggttgaagagacagctcaccggtgccagcgaatcccagaaatggccggtatcggtcttcacctggagcaaatcaatcgggtaatcccgcgcccacgggcaccagatatcggtgatcagcgccatcgccaggcctttttcgctcgccacgcggcagtactggcgggcaatggcggagtaggcgcgggtatccgtcagcacgatatacgggttagaaaagccggagttaagcgactccacccagctaccggagagcccttcggaatagctcacccgcgggcgcagatactcaagatggctgaagaacgcattggcgatcccgcgcgtggactggatccccagcacgaagacggcgtcggcatgggtaagttgctggaccacctgcctgaacgtttcgctttgcgccagctggtagacatgggcaatggcgtccacctccagcgacagggagtgctgaaggcgatccgacagcggctgttgctgcttccaggagtcgagacgctcgttaataccccagggctggtggggattgcgcaggctttttttggcgtcgtccaggttgcgatagcccagcttgcgcagaaagcgtccgacggtgatcccgctggttgccgtggccagcgccacgctctctgccgtttcaaaggggatctgcccgacgtgcgccagcatccagcttgccacccgtttttcgctcggggtgagctggctaaaggtcgcttcgatacggctcaacacctcaggtttggtcgtcataccgcctcgctgttaactggctgtcaaagtccgggtttctgttaccggattaacaatgcaggacgcgtgccatgtttacattgcggcgaaaacgcgctgtgcagcaaagttaatgcaatatttgtttaacagatgctcaacatttgtgcagcgtagttcacttttggtgcagtgtccggcctgagcggtatctatttggtgaatacgtcagcctcttcacattttttggtaagatgaacgctctgtggataagggagggagcctaacatggcgaatttgccctggcgggtcagcgtgcgcctgatggctctcgcaaaaaaaatagcgatggtcatcgggatcattgtgctcgtgctgctggcggtgcgggtttatctttcgcagcaggggccggccctgcatcactggcacacctggcgggctgacgaaatgtccgtgcaggagatggataacgcgaccttcgcagcgtatgtcgcgcgggaaaacgccatcttcaccgctctcgatgctgaggtgacggcgaaagtcacccccgcagagcgcacgccgctgaaccgttattaccgccagagcctggtgtggccaggacacttttccccggatgcaaaccggtcattcgtgctgatgcctgccggaaagccgcgcggggcggtggtattgctgcacggtctgacggactcgccctacagcgtcaggcatctggcagagaattatcaacagcacggctttgtggccgtagtgcctcgtttgcccggacacggcacggcgccgggtgccctgacagacgttgactgggaggcgtggctggccgcatcgcgccttgcggttcgtgaagcgacacgcctgacggggaacgatctccccctgcatctggtgggctactccaacggcggggcgctggcgatgaaatacgccctcgacgctcttgatgcgcctgaactgcgtaaacctcagcagatcgttttgctctcaccgatgattggcgtcacggcgtttgcgcgctttgccggattcgccgggctaccggccatgttaccggcgtttgccaaagccgcgtggctcaacatttcgccggaatataatccttataaatataattcgttcccggtgaatgcagcacgtcagtcctggctgcttacccaggcgctgcatgagcagataaaccgcgatgttcatgatcacaaactggcgcagcttccgccggtgctggcgtttcagtcggtcatggattcaacggtcagtacccgcgccgtggtcagcgggctgtttgaccagcttccggcaaacggcagcgaactggtagtttttgatatcaaccaggccgggagtttccgtccactgttcaggccatcgtcctggacggcggtggctgacctgctgcccggggcaaaaaggcgttacagtgtcacaattgtgaccaatgccagccccgacaggtttgatatggtggcaaagacaacgccagcgggtagcacccgggaaacggtgatgccgctgtctgtcgcgtatccgcaggaggtttattccctgtcgcatgttgctattccgttcccgcctgatgacgatctgtatggccgccatcctgaggtgaaaaaccactacggtatcagcctggggacgatagccctgtggggagaaacatcggttctgagcgttggcaaagatgcgctgatgcgcgtgacgtcgaatccgttctacgattatatgcagacgcggatcgacagccgtatcggggagaattaagcccgacgtggaatagattaggtcacaccggggaactgtgttaaacagtaccgttcaggcgtataccccataccggaccccgtttctgtgctgacaactcttatttatcgaagccagctgagcttaacctgcacctccgcagcgttaagcgcgctggttgaacaggccaggatccgtaatacggagcagggcatctcaggcattcttctctcccgtggacgtgacgttctgcaaattctcgaaggcacggaacagagcgtcgtcgcgctttttaacaccatccgtgcggatgaccggcataccggcgtggtggagctgatgcgcgattacggcccgcgcagacgtttcgaagacgtgggaatgctgctgtttgacctggatgttcagaccccgaaagcggttctggcgtcggttctgcattacagcaagctggaaagctatctgacttctgaggatcgggtctttaaatttattcagacctttatcaccggcaaaaccgctatcccacccgcttcggactatgagcctgataaatggacgctttcgcgagagcgcgcgccgtttggtaaagggttaggtctgctggcgggacagccctgccagtttgcgctgcaacccattgtcgagccgtccgaaggcaaaatcagttctctcgaagcgctgatacgcggaaacgacggcggcagtccggagcatttcttccgtagtctcgagcgtgaacagatttacgaagtcgacctgcaaaccaaagcctggacctttgcgctggcgcaaaagctcggcatcggcagccacaaactggcggtgaacctgctgccaatgtcgctggttaacgtgccgggcgcggtagagttcctggtaacgcagatcaaaaagcacaatctacagccagagcaggtgatcattgaagtcactgagagcgagatgatctctggcttcaaccagtttaacagcgccattaaacagctgcgcgcggaaggggttgggctggcgatagatgattttggttccggctatgctggtctttcactgctcacgcggttccagccggataagctcaaaatcgacagagagatcgtcagcgatatccacctgagcgggcccaagcaggcgattgtgaagtcgataatcagctgctgcaccgatctggagattacgctggtcgcagaaggcattgagaagatagaagagtggtgctggcttgaatccgccggtattcgccgcttccagggctttttgttcgcccgcccgcagctcaatggcgtaggtgatatccactggccccatcgggtgggttaagcaaattttccctcgccatatttccccgacaccctgcctgtgcttaaatagctaaaccggtttaacatgatttagctaagaaggtgatatggagacgatctgggtacttggcgatgccgtggtggatctgttgcccgacggagagggcaaactgctgcaatgtcctggcggcgcaccggccaatgtcgcggtaggggttgcgcgtctgggcggcagaagcgcctttataggccgggtgggcgacgaccccttcgggcgttttatgcaaaaaacgcttgcggatgagcaggttaatacagaatggctgcgcctggacccgcagcatcgcacttccacggtggtggtggatctcgataacgacggtgaacgttcctttacctttatggttcgcccgagcgctgatttattcttcgactctgccgatctcccgccattccgcgccggggagtggctgcacgtctgctctatcgcgctcagcgccgaacccagccgttccgcgacgtttcaggcgatgtccgctatcagaatggcggggggatttgtcagctttgaccccaatatccgcgccgatctctggcacgatgaagtcgagctgcgtcagtgtcttgagcgggnnnnnnnnnnnnnnnnnnnnnnnnnnnnnnnnnnnnnnnnnnnnnnnnnnnnnnnnnnnnnnnnnnnnnnnnnnnnnnnnnnnnnnnnnnnnnnnnnnnnnnnnnnnnnnnnnnnnnnnnnnnnnnnnnnnnnnnnnnnnnnnnnnnnnnnnnnnnnnnnnnnnnnnnnnnnnnnnnnnnnnnnnnnnnnnnnnnnnnnnnnnnnnnnnnnnnnnnnnnnnnnnnnnnnnnnnnnnnnnnnnnnnnnnnnnnnnnnnnnnnnnnnnnnnnnnnnnnnnnnnnnnnnnnnnnnnnnnnnnnnnnnnnnnnnnnnnnnnnnnnnnnnnnnnnnnnnnnnnnnnnnnnnnnnnnnnnnnnnnnnnnnnnnnnnnnnnnnnnnnnnnnnnnnnnnnnnnnnnnnnnnnnnnnnnnnnnnnnnnnnnnnnnnnnnnnnnnnnnnnnnnnnnnnnnnnnnnnnnnnnnnnnnnnnnnnnnnnnnnnnnnnnnnnnnnnnnnnnnnnnnnnnnnnnnnnnnnnnnnnnnnnnnnnnnnnnnnnnnnnnnnnnnnnnnnnnnnnnnnnnnnnnnnnnnnnnnnnnnnnnnnnnnnnnnnnnnnnnnnnnnnnnnnnnnnnnnnnnnnnnnnnnnnnnnnnnnnnnnnnnnnnnnnnnnnnnnnnnnnnnnnnnnnnnnnnnnnnnnnnnnnnnnnnnnnnnnnnnnnnnnnnnnnnnnnnnnnnnnnnnnnnnnnnnnnnnnnnnnnnnnnnnnnnnnnnnnnnnnnnnnnnnnnnnnnnnnnnnnnnnnnnnnnnnnnnnnnnnnnnnnnnnnnnnnnnnnnnnnnnnnnnnnnnnnnnnnnnnnnnnnnnnnnnnnnnnnnnnnnnnnnnnnnnnnnnnnnnnnnnnnnnnnnnnnnnnnnnnnnnnnnnnnnnnnnnnnnnnnnnnnnnnnnnnnnnnnnnnnnnnnnnnnnnnnnnnnnnnnnnnnnnnnnnnnnnnnnnnnnnnnnnnnnnnnnnnnnnnnnnnnnnnnnnnnnnnnnnnnnnnnnnnnnnnnnnnnnnnnnnnnnnnnnnnnnnnnnnnnnnnnnnnnnnnnnnnnnnnnnnnnnnnnnnnnnnnnnnnnnnnnnnnnnnnnnnnnnnnnnnnnnnnnnnnnnnnnnnnnnnnnnnnnnnnnnnnnnnnnnnnnnnnnnnnnnnnnnnnnnnnnnnnnnnnnnnnnnnnnnnnnnnnnnnnnnnnnnnnnnnnnnnnnnnnnnnnnnnnnnnnnnnnnnnnnnnnnnnnnnnnnnnnnnnnnnnnnnnnnnnnnnnnnnnnnnnnnnnnnnnnnnnnnnnnnnnnnnnnnnnnnnnnnnnnnnnnnnnnnnnnnnnnnnnnnnnnnnnnnnnnnnnnnnnnnnnnnnnnnnnnnnnnnnnnnnnnnnnnnnnnnnnnnnnnnnnnnnnnnnnnnnnnnnnnnnnnnnnnnnnnnnnnnnnnnnnnnnnnnnnnnnnnnnnnnnnnnnnnnnnnnnnnnnnnnnnnnnnnnnnnnnnnnnnnnnnnnnnnnnnnnnnnnnnnnnnnnnnnnnnnnnnnnnnnnnnnnnnnnnnnnnnnnnnnnnnnnnnnnnnnnnnnnnnnnnnnnnnnnnnnnnnnnnnnnnnnnnnnnnnnnnnnnnnnnnnnnnnnnnnnnnnnnnnnnnnnnnnnnnnnnnnnnnnnnnnnnnnnnnnnnnnnnnnnnnnnnnnnnnnnnnnnnnnnnnnnnnnnnnnnnnnnnnnnnnnnnnnnnnnnnnnnnnnnnnnnnnnnngctgttttcgaaacgccgggcagatgcaggtgatcttcggcaccggggtggtgaataaggtttacgccgcgtttattcaggcggcagggattagcgagtccagtaaatcggaagcggcggatattgcggcccgcaagctgaacccgttccagcgtatcgcgcgtctgctctccaacatcttcgtgccgattatcccggcgatcgtggcctcgggtctgctgatgggcctgctggggatggttaaaacctacggctgggttaatccggataacgcgctctatatcatgctggatatgtgcagctcggcggcgtttattattctgccgatcctgattggtttcaccgccgcgcgggagtttggcggcaacccgtatctgggggcaacgctcggcggcatcctgactcatccggcgctgaccaacgcctggggcgtagcgtccggcttccacaccatgaacttcttcggtcttgaaatcgccatgattggctatcagggaaccgtcttcccggtgctgctggcggtgtggtttatgagcattgtggaaaaacagctgcgccgggcgatcccggatgcgttagatctgatcctgacgccgttcctgaccgtcattatctccggcttcattgcgctgttgattattggcccggcgggacgcgcgctgggcgacgggatctccttcattcttagcaccctgattgcccacgcgggctggctggccgggctgctgtttggtgggctctattcggtgattgtcattaccggcattcaccacagcttccacgccattgaggccgggctgctgggtaatccgtcgattggcgttaacttcctgctgccgatctgggcgatggcgaacgtggcgcagggcggggcgtgtctggcggtgtggttcaaaacccgcgatgccaaaatcaaagccattaccttaccgtcggcgttttccgcgatgctgggcatcaccgaagcggcaatttttggcatcaacctgcgttttgtgaagccgtttatcgcggcgctgatcggtggtgcggcgggcggtgcctgggtggtgtcggtgcatgtctacatgaccgccgttggcctgacggcgcttcccggcatggcgattgtccaggccagctcgctgctcaactatataatcggcatggtgattgcctttggcgtggcgttcaccgtctctctgctgctgaaatataaaacggactctgaataatgaccttatcttcccgctggcctgccgtgttgcaggccgttatgcaaggccagccgcgtgcgctggcggacagccactatccgcagtggcatcccgcaccggtgacagggctgatgaacgatccgaacgggtttatctggtttgccgggcgctaccatctgttttatcagtggaacccgctgggctgcgatcatcgctacaagtgttgggggcactggagctcagcagatctggtgcactggcagcacgagccaatggcgctgatgcctgacgaagagtatgaccgcaatggctgttactccggcagcgccgtggataacaacggcgtgctgaccctgtgctataccggcaacgttaagtttgacgatggcggccgcaccgcctggcagtgtctggcggtgcaaaatgacgatggcacgtttgccaaactgggaccggtgttgcccctgccggacgggtacaccgggcacgtccgcgatccgaaagtatggtggcatgacgggctgtggtacatggtgctcggcgcgcaggatcgacagcagcgcggcaaggtgctgctgtttacgtcagccgatttacacacctgggcgtcatgcggcgaaatcgccggtcacggcgtcaacggactcacggacgcgggctatatgtgggagtgcccggatctgtttgagcttgatggcacacacgtcttgatctgctgcccgcaggggctggcgcgcgaaccgcatcgctatctcaacacctatccggccgtctggatgagtggggcatttgattatcaaacgcctgcatttgcgcacggcgagctgcatgagcttgacgccggtttcgaattttacgcgccgcaaaccacggtggcagaagatggccgccgcatcctcatcggctggttgggcgtgccggacggcgaagagatgctccagcctacgcgggcgcacggctggatccaccagatgacctgtcctcgcgagctgcgctaccgcgacggtaagctctggcaaaccccggtccgtgagctggaaacgctgcgcgaggatgaacatctctggcagggacgcgccagcgatgccccggtgctggcgggagcgcgtcttgagttcgaactgagcgcatcgagcgtgaacgtggattttgccagcgcgttgcggctgattgtggatgatgaggggatccgtctggaacgcgccagtctgaaaaccgcagacacgctgacccgctactggcagggcaatgttcatcatttacgcgtgctgtgcgactgttccagcgccgaaattttcatcaatcacggtgaaggcgtcatgagcagccgctattttcctgaccatccggcccaggtacgcttcgaaggtgcgtccgatatcacattacgctactggtcgctgcgcagctgcatgatagaatagaggttttggcagccggatctaagtcgttgtgagaaaaacaaaacgcgtcaccattaaagatatcgcggagctggcgggggtatcaaaagccaccgccagcctggttctgaacggccgcagcaaagagcttcgggtggcggaggagacacgcgagcgtgtgctggcgattgccaaagaacatcattatcagcccagcattcacgcccgttcgctgcgggacaaccgcagccacaccattggtctggtggtgccggaaatcaccaactacgggtttgccgttttttctcatgagctggagaccctctgccgtgaggcgggcgttcagctgctgatctcctgtagcgatgaaaatcctggccaggagacggtggtggtcaataacatggtggcccgccaggtggacgggctgattgtcgcctccagcatgctcaacgacgcggactatcaaaagctgagcgaacagttgcccgttgtactctttgaccgtcatatgaacgacagttctctgccgctggttctcaccgattcaattaccccaaccgccacactggtggccgacatcgcgcgccagcatccggatgagttctacttcctcggcggtcagccgcggctttccccgacgcgtgaccgtcttgaagggtttaagcaggggctgcgtgacgctggcgtcgagttacgtccggagtggatcattcatggtaattaccatccgagctccggctacgaaatgtttgccgagctttgcgcacgcctgggccgcccgccaaaagccctttttaccgccgcctgcggtcttctggaaggggtgttgcgctatatgggacaacataatctgctgcaaagcgatatgcgttttggccagctttgacgatcactatctctatgattctttgaccattcctgtcgataccgttcgtcaggataaccgccagctcgcctggcactgctttgatctgattggcaaactgattgaaggggaaacgccggagccgatccagcgtaagctggatgccaccctgcaacggcgatacaaggccgtggagtgacagggtaacgtcttagggtgacatcaataactttaattaattaaagattggattcagccgataaccaaagggaaattatatccctgaggtgtgttatgtcgttgaaaaaatcatccctgattatcctgttttccctgcttttcttctttgtggccagcactatcaccagcgttgggctcatcattaaaagtaatacttcgctggataatgtgaacaaagaaattcaggtggttctgtccattattgatcccattaaccacagccgaaccctgcgcgtcagggttatggagtatgtgaaaatggtggaagcgggggacgctaccgacccgtctgcgaaactggcctcggttaaagaggcgctgaccaaagccgatagtgcattttcggcgtttatggcctcgccgcgtttgccggacgaagcccaactggtcactgcctaccaggaggcgtggcaaaactaccgtaaccagggactggcgcctctcatcgccgctgccgccgctcacgatgtgtcgcggttcaacgctcttattcccgtggtgtctcaactcgatcgccaatatgaaattgtgctcgatcaggttctctccgttcaccagaagtacgccaaaacgctgaacgaggatgcgagtcataatttcgtgtcgggtctggttattatcgcctgcattgcggtgctgttcgtggtggtgattttcgccgtcagcctgctgatgaaacgcgtggtctttgcgccggtgaacctggcgcgcgagcactgtcgccagattgcggccgggaagctggacgtaccggtaccgattaagcgtgattccgggaatgaaatcgatcacctgatgtcctcgatggagcagatgcgccaggcgctgctctccaccatttctcaggtgcgcgatgccagccacaccgtgacgcatgcggcgcaggaaattgcctccggcaatatcgacctggcctcccgtaccgagcaacaggcttcggccctgacccagacggccgccagcatggaagagctgagcgcgacggtggcgaataacaccgacaacgttttccaggccggtaagctggtgcaggatgccgtgaaaaatgcccataccggtgaagcggtaacccgtgaagtcatcgaaacgatgaatactatcgcgtccaattcgaagcgtattgaagacatcaccagcgtcatcaacagcattgctttccagactaatattctggcgctaaacgcggccgttgaagcggcgcgtgctggcacgcaggggcgaggatttgccgtggtagcaagtgaagtgcgcaccctggcacaaaaaagcgcggtggcggcgaaagatatcgaaagccttatcgcccagtctgtttccagcgtgaaaaacggtgcacaactggtgaatcgttcgggagaggtgattgattctattatcagctctgtgaataaagtgcatacgctgatggaacagatttcggttgcctcagaagagcagagccgcgggattggtcaggttgggcaggccgtaacggagatggacggtgtgacccagcagaacgcggcgctggtgcagcaatccgccgccgccgccgcctcgctggaggagcaggcgcagcagctgtcccagagtatctcgagctttagtttgcctgctacggcgtgatgttcagagaggctcctgagggagcctttttaatgtctccatgtagccgctgcacaatctccttcagccattactgttatccgtacaaagccgctatcacataaattttatctttccccggcaatatttctgttcctcatccgtctacctcatcagagaccataatcattcaacataaacgaggtacacatgagaaattttgatatgcacggaaaaggtcacgggcgtggtttgggccgccatcgtatgggtaagggcatcgtgattggcgcagtcctgttcgtggtgcttggcctgctggtcatgtccctgtggaacgcgttgctcccggccatcctgggggttaaagccattggcttctggcaggcgctggggatcctgctgctgagccgcattcttttcggtgggctgggtttccgtccgggcatgttcggtgcgcaccgccgtatgcacgaacaatggatgaatatgagccccgaacaacgtgaggccttcattcagcagcgtcgggcgggatttgggcgccacggtcattgccggtggcacgatggccgggatgaaaagcgagatgataacggtgcgaaagcgccggaagccgagtgagcgatatgaaagccggtgaggcgggggaatcattactgatctcggcactcaaagcctgccgcgcgcggctaaaagccttcattcgcggacggactgcggttcgtgatgatgtcgatgatattcttcaggaagtgacctggcagttgatgaaagtggaacaaccggtcgagaacgtcgccgcctggctgtttcgcgccgcacgaaatgagatgatcgaccgggcgcgaaaaaagcacgaggtttcactgccggggtacctgacagcagataacgaggactttcctgagcaggagattgcagaaacgttattcggcgtaccgcaaacgccggaggaagagtatctcaacatgctgctatgggaagagttggggcaagccctgtcggaactgccgccacctcagcgcgaggtgtttgaaaaaacggaatttgagggctacagcatgaagatgctggcagaggaaacaggcgacagtgtgcaggcgttattatcccgcaaacacaaagccgtgcgatttttgcgtagtcgcctcaaggatatttatgaagcgttgacagggcaataaacttcgaccactctgaaaaacaatattttaaaggggtcgttatgcttcaacggttagcaaagaaaaaggtgctgttactctctgctctgatggtttcagggctggtcagggcagaggagtcgcttccggatgtggtgaagcacttcagtgaacagcaggacatcaaaatcatcaagaaaattgacgcccccggcggcgcgccagcgtggctggggaaatatcaggacatgggcgtgacgctctttctgacccctgacggaaagcacgtcgtgtctggctatctttatgatgagaagggaaccaacctcagcgaggcctttttccagaaagagatctacgccccgatgggccgcgagatgtggaaaaagctcaatgcggcgcatcccctgaaagagggcgcggagagtgccccgcgcaaagtcttcgtctttgccgacccgttctgcccgtactgcaagcagttctgggctgaagcgcagccgtgggtgaaggctggcaaggttcagctcaatacgctgctggttgcatttcttaacccgaacagcgggcgtaacgcctccgcgatcctgaatgcgaaagatccggtgtcggcctggaaaacgtacgagctgtccggcgggaaaaagctgccgaaacctgaagctgcggcttcccgggaaaccgttgagatcctgcaaaatcaccagacgctaatggacagtcttggcgcgaatgccacaccggctatttattacctgaatgagcaaaacgaactgcaacaggtcgtgggtatgccagacgcaaaacagcttgaggcgatgttcgggccgaagccgtaaaagaaaggcagaaacaggacgtttctgccttttttcagtcaactaccccagcgtccccggaggtaatttactgcctcctgcgtctgcggctggttaagatagtcttcacggaacaggatggtgcccttaacgtctggcagtgaatcgttgaggtcgagctgttttttcagctccggtacgccgccgttcaccgtccagtccggttcgtttctggaaggcgcgcccactttgtagaacgcgatcccgatatacaggcgggtatgggtcggtttcaccacgtcagcccaccattttgtcagcacatcgtaacgtgccgcgtcgcgggcgaagggccagtagatctgcggcgcaatgtaatccagtaaaccctgctgtacccatttgcgcgtgtcagcgtaggattcatcataggctgcggcaccgcgcgtgtccgagcctgccgggtcgaaggagcgattgcgccagacccccgccgggctaacgccaaattcgacctcaggtttagcctgcttgatcgcccttgaaacctgcacaatcaactgctgcgtattgtgtcgacgccagtccgcttttgacgcaaaaccttcgccatagcgcctgaaggtccaggcatcattcagggtggaccccggcgtctcggtgtaaaaatagtcatcgaactgaacgccgtcgacagggtagtgatttaccacttccatcaccacctgggttatccagtcccgcacgtcgggaatgcccgggtcgagaacaaaacgatcccccgaggtgcggatccactccggatgctggacgtacacgctggaaggatgaagcgacgaggtgcggttaagcgcggcgatggtcgacggcttcgtgttggtggaaacgcggtacgggttaaaccaggcatgaaccttcatcccgcgcttgtgcgcttcatccagcataaactgaagcggatcgtaaccgggatcttccccgatagtccccgtcagggtatctgaccagggcagtattttagaggcccacagcgccgtactgtccggttttacctgaaagaagacggtgttgatcccaagttttttcagcttatcgagcttgtccgtcagcgcccgctgttgctgggcgatacgctggtccgcgctacggccattcaccgatgacacgggaggccagtcgagacgggagacggtcgccagccagatcccgcgcatgggttcgttagtctgctgtagaggtttcgcctgcggcagcggggtaacgagtgatttgggggggttggaagtgcaacttaccagtaaaagcgcgcagccaagcagcgcgccagtccgttttacgtgtcgcatcatttgcgtgttagctcctgggtgtccggctatccgtccagggattaaacgccggttcgtcctgttccccgttaccgtcatcgtgaagagagtcgaggtagagggcttcaacttccgcccgcgcccatggggtgcggcgcaggaacttcagactcgatttaacactcgggtccttgcgaaaacagttgattttgattcggttgcccagttcattccagccatatcgcgcaaccagcgcgttaacctgcatttcgagcgttacgccatgcaaaggatcgttggaaatatgtgctgtcataggcgtccggtagtctcattttttatggggatgtgataaacgctcaaaggttacaagaaagcaggggacgcggcaatttcagcgtgaggttcttcacccgtgaagggtgaagaagattttccggttaacgctattttttaaacagttcaggcgcccacggcgtcgggtctacctccataaagggcgcacgctcaaagcgggacttcagcgcccagggcaccgtacagtcgaaaatcgttttgcaggtgatcccgttgccacgaatggaggggctgtagtccggcgtctgagacggatcgagctggtgtccgcggatccccgacagatgggtgatgctgacatcgccctgcatacgggtggtcatcgcccacaggatgtcgtcgctgtcgaaaatatccacatcttcgtcgacgagaataatgtttttaagctcggaataggtggctaacgcaatgagtgccgcctgaccctgacgcccttcgtcagagggctggcgttttttcacctgcaatacgccaagaaacttgccgccgccagcggtatgcgcatagacgttttgcagaaaaccggggatggcttcttccaccgcattacggatgctggcctccgttggcaaaccggccagcgtggtgtgctcctcgcccggtcctaccagggtttgcaggatcgcctgatgacgcatcgtgacggccttcactttgattaccggtaaggaggggttagcttccccgcagtagccgggaaattccggcatcgcgtgcccggtgtgggtatgctgatcttcttctacacgcacgcccggcagcagttcgccttcgatgataatttccgcacgcgctatcgctttttcatttacggccacaccctgcaccagctctacgggggtctgacgtaacgcgccggcgacacccagctcgttgtagccgaagggcgtggtaggggcttcgaaacaggcgccaatatagatagcgggatcgagacccatattgatcgtgaccggcaacggtttgcccgcctcctcggctttcttacggaacacttcaatatggcggcctgcggcaaggaacatggagagctcatcgcgctcctgcacgcagagacggtgaatagtgacatcggtcagtgaggcatcttccggatcgcttgccagcaccagccccagacagaagaacggaccggcatctatcggcgtgttggtcggtgccggaagcaatttacgcagatcgaagtccggatcgtcggcataaaacacctgttcctgacagggcgcctgtgccgccggaaccacaacgggagcaatcgggtttttcacggcctggcagacatgttttgccagttcagagggctcgcagcccaacaggagcgccgcccgctcgcggctggcgtgcattccgaccagaatacgcgagtcgggatatcccttaatagcgttaaacatcatcgccgggccaatgcgcgtcggacgttttaccgtgccgccagcaccaatatgccggtacacacccgccagctccgcgtcaggatcgaccggatggctggtttcaaggtattgaccttcatggcgtttgagcagttcgatagcacttctgagatcgttgatgtggtttttcatattttcctcctcggatgaaggcttccattcttaaccggacgaagagggttatcaattgcatcatttatgctattttaatatgaattttattatcaataataaaggcatggtatgcagtttcgactgatgcgcaatttcatcgtggtggcggaagagcttcacatgcatcgggcggcggagcgccttaacatggcgcagccagcgctgagccagcagataaaaacgcttgaagatcgtcttggggtcttgctctttagccgggcgaatcgtcgcctgacgctgacgccagccggtgaggcatttctcagtaaagccagagtcgcgattttaatgaccgatcaggcgattctggatgccagacagacggccagaggggaacagggcgtgctgaatctcggatgtgtttcaagtgcgatattcgacagtaagctacccgccgcgctgcggcttttacatgagaaatggcccgccatcagcctttccatgatgacgggtaacgtgcaaaccctttataccggcgtgcaaagcaaccagctggatgtggccattattcgtgccccgttaccgctattgcctgacgatctgcaaagccgtccatttacaacggaaaaggccgtgctggccttacctcgtcaacatagcctggcgggctccgccgcgctgacgcttgcgtcggtgaaagaggagaagtggatcgccctgcgcgacccggaggggatggggctggagcaatatttctatgatgcctgccacagcgcgggcatacagcctgacgttgtgcaaaatgccaccgatgtctccacggtgataagtctcgtctcggcagggtttggcatcgccatgctgccggcttcagcgaaggcgatatgcgtacaaaacgtcgtgtttgtggatattcttgaccgactccgggagagcgagctgacgctggtttgccaccggattattcgctctgaggtcctgaaaaaattgatgagcatcctcgatcatacctgacgtccggcggcctgaagaagctgttctcgcagccagcggttagccgtatcctggctgtttttcgggtgccagtacataccgatgacgatcggagggagatccagcggcggcggaaaaatatcaagcgtttgcgtgaaccgtagcaacatgcgtctgggtagggtgcagagcaaatcggtaccggcaacaatcgcaggcgccatcgcatagctttgcgtcgacatcaccacgttacgctggtggccaagccccgccagatgctgatcgacaaagcccgcgaacgggtcgccctcggatgaaaccaccaggtgggaaaggctgcaatagctttccagatccatcggccccgtaccgcgcggatggcctttacgctgggcggtggcatattcatcgtcaaacagcttgcgtctgacccatgcatcgtgcgcccccgcgttaacgccgacataaatatccacatcgccattttccatctgcgctggcagcagcggggtttccgggagcgcaaaacgcaggcggatgcctggtgctgcgctgctaatctgattctgcaactctgcccccagcatcagcgccgggttctcgtgcagggcaatcacaaaggtgcgggtgctgttatgcgcgttgaacgtggtgggttcaagcatcgccgatataccctgcaaaaccgtcgcgacctgcggccttaacccctcggcgcgcggcgtaggtaacaccccacgtccgtgtggggaagggataaacagcggctcatcgaacaggacgcgcaggcgcgcaaggcgggcagacatcgccggctggctgatgcccagccgcgcggccgcatgggtgatattttgatccctgagtaacgcatccagcgtcaggatcaggtccatatccatatcggaggagggcatcttattgtgcgtcatagcttgctgccgttgttcaacagggaaggttagccattgccagaaaagcagtcactgcattacctggctcctgcatgcggctgatcatgaccagatttgcggtcagcgcctgagcattcaggttgcggtaaatcagtccgggtatttgcacctgttgcaggggggcgggaaccagcgccagaccgagcccggctgcggcaaatgccagaacgcttagcgtactgtttgaacgatgtgccacgcaaaaaccatccccgagctgctgcgccagcagcacagtcagattttcattggcgtcatgcgcgtcgtacaggaccaggggatgaccggcgagcatttcaacggagaggtgcggatggatggctaagggatgatcgtcacacattgcgattatcatctcccagtttccggttttctgcaccctgatctgcggatcggctgtcgtactgttatccggtgtataaccgacatcaatatgccctgcgaggatcgcagctacctgtttctggggagcgatttcctgaatggtgacttctgcatccggatgggttttacggaagcgacgtacatcggtaatcattttgccactaaaaatggcgttcccggcaaaaccgacccgtacacgccctgtctctccccgtatcgcacgctggactgccagacgcgtgtgttccatctgttccagcatcagtctggcttcgctgagaagaagcgatccggcctcagtaagttccacacgacggctggtgcggataaacagcggaccgcctaactcggtttcaagggctttaatctgcatgctaagcgcaggctgaacaatatggagtcgctcagccgcgcgtccaaaatgctcttcttctgcaacagccaaaaaatagcgtaagtgccggagttccattgccaccctgactcatcattaaaaatgattgtttagtaaaatatatatatttgagtataaaccgcttcacggccaaactgaacgcatcaactcaaacaggaatcaaacaatgcaaactcaccaactgcaagaccgtcaggatcttaacgacctcatgaatggctggatgcaccgcgacctgggcgaatgggagcagctgcgtaatctttttcatccggacggcacaatcgaaattacgtggttcgaagggctcgcgagcgattttgtcgagggttccatgcgtatgggcgcttcagatttgcgcacaaaacatatgattggctcgcccgtcgtcacttttaacgaccgcggcgacaaagcgattcttgaaaccaatgcgatgatcatcgctgaaaatataaaacttaatattggatgcgaatgccacaatcgtttctacgatctggcagaaaagagagagggcgtatggaagctgttccatcgtcagagcatctacgacatgggtattttcacctttccgctgggcccggttgagattgattcaaaaattgctgccaactatccgcgggaatatgccgcgctagcttatctgctggaacaaagcggttttcccctcggccgcgtatttgccacgcgtgacagtgaactagaagcgaatatgaaagcgaacgcaaaaaaatggctggctgtctgacaggttgagcgcagggccgaacagatttcgccggctggttaatacccggccgcggggccctgggcgtgagatagcggtcccaggctgacatatttagcctgggacgcagagactctcttattgcgcgtcccggttggtataggtcaccggaacccacgcgtagccttcccgctcacctttcttcacatacccgatcccggggaaaggcagatgtggcgccgcaatcagatctttgtttttcacaaactcagcgaacgctgcgttgcgtacccgggcggctccgtcctgatcctcatcgtaagcaatcgtcacgttgggctgtgggaactgaaccgcggcaacgtgaatgatgtcgccgacaaaggtaattttttcacctttgctctccagcgtgtagaacgcggaccctggggtgtggcccgggtgaaccgtaccgctgatgcccggcagaagctgttccgtcccggagaaagtcttcactttcccgccatccagatagggctttaaggtcttgtgcgcgacgtcgaagtagttctggtcatagccagattttttctggttctcgtcgttaaagaagaaatcgatatccggtttgccgacatacacctgtgcacgggtaaatacgcgctgaccgtctttgaccaggccgcctgcatgatcggagtgcgcgtgggtgatcaggatatcggtgatgtcctgcggcctgataccctgcgtcgccaggctttcaatcagccgcccgcctttgccagggccaaagagctgaccggagccggtatccaccagaattttgtggccgggcatagcgatatagaacgcgttaatcgatgcttccaccggattggcctggaagtttttggccagtaacgcatcggtattttccgccgtcgtccggcgcagtaaggcgtgcaggtcctgcggcacgctgccgtccgtaaaggcggtgacaatcgtatcgccaacctgaacgctgtagccgccggcctgctgtttcaccacatgctgcggaacgctggccaccgcgtggatcgcgggaaagaataaaaccgaaccggtcaacagggttgataacgcaagttttttcacagtaaacatgatgggctcctcaatagtaagttcatcatagttcaactgagatttttgagaacagcagggaagtgaatgtgacctatccatgaaatggataggtctgagaggatgctttacagcacgccggtaccgccgtcagagcaccatacttgtccggaggcgtatgagcaggtatctgaggcaaaaagcacatacagcggtgcgatttcaaccggctggcccggtcggcccaggggcgtatcttccccgaatttctgaactttggactgcggctgaccgccgctggactgaagaggcgtccagtatggacctggcgcgacggcattcacccgaatgccacgcggccccagctgctgagccagagacttggtaaaggccacgttacaggctttggtctgcgcatagtccaccaggatcgcgctcggtttaaacgcctgaacggaagtggtgttgatgatcacggcgccttcctgcaaatggcgcagcgcagctttagtgatccagaagggggcatagacgttggttttaaacgtcgcgtcgaaatctgccgtggtgagatcgtcgatcgattcgcagtactgctggcgtccggcgttgttcaccaggatatccaggccacccagttctgcgacggctttttctaccagcgtatcgcagaacgactccacgcgaatgtcgccgggaatggcgaccgctttacggccttcggcccgaatcagcgcaatgaccgatgccgcatcggactcctcttccgggagatagccaatagccacatctgcaccttcacgggcataggcgatcgctactgcgcgaccaattccggaatcaccgccggtaatcagcgctttttttcctgccagtttgcctgatccgatataacttgtttcaccgtgatccggtattggcttcatttccgatgccagcccgggggccctttgcggttgttcagcaaacggtggacgagggtaatgcagcgtgtgattatttcctgtagacataccggcctccttaatagtgaattcaaagattagtcgttaattaaacgtaagcgggcaaaattgacaaattcagacaaatctatcttccgggagcggatataaaatattttctcaagccagcatgtaataccagaaaagggcgacctcatctttttccggcagggcgttgtaaaggtagcgatcgtaaccgccgagaataaacccatagtgacgatagaactgacaggcagaaacattaacgttctgcgtctccagccgtaacccgggcgcattgaggcttcgcgcccagacgtgggtggcggacatcagcttgtgcgccgcgcccgtacggcgttttgaacgctccacggcaatgtaatccaccgaaataaatttattccagttgcaggacgcggtaataaaaccggcgatttcaccgtcatccgtttcggcgataagaaatattgaatccggattaacgcaatgattttccagcgtctggagatcaagttcataggttttaagataaggttcggtcagcgcctcgatatgcaaatcaccattgagaaatggctctctggcaatctcatcaaccttgaaagaaaaatcacaacattcaaggcgggcgaggtctgtacttaatccttttcgaatatgcatagtattccttaagtgggagttataaatagataatagacgaagcggcatcccctgctggcataacactctgtagatcctggtctaagcttgtatttcgttccgcgtaaaaggtggtcattcgaggacaatgaatggaattcagaacatgtcgcaggcactggggtgctgagtttatttccgatgacgttgtacgttttcgcgtctgggcagaagggcagaaagatctcacattacgtttaaccgataccgacattcccatggcggcggtgggcgacggctggtttcagattgacgtgcccggcgtcatgcacggtacgacttatcagtttgttttacaggatggaatggcggtgccggatccggcctcacgcgcgcagcaggctgacgtcaacggcccgtcggtggtgatcgacccgcgtcgcagcctgcccactcagcgggaatggcaaggacgatcgtgggaagagacggtgatctacgagctgcatatcggcaccttcaccggggaaggaaccttcagggcggccatcgacaaactgccttatctggccgggctgggtattacgcaactggaagtgatgcccgtgtcccagttcgggggcgcgcgcggatgggggtatgacggcgtactgctgtatgccccgcactcggcttatggcacaccggatgattttcatgccttcattgatgccgcccacgcgctcgggctttccgtggtgctggatatcgtactcaaccactttggcccggaaggtaattacctgccgttgctctcaccggcgtttttccatcgggatcatatgaccccgtggggcaacggtattgcctatgaggttgaggccgtccggcaatacatcgccgaggcgccgttattctggctctcggagtatcatcttgacggtctgcgcttcgacgccatcgaccagatccatgacgacgctgagacccatattcttcccgagatagcgcaacggatccgcgacgcatttccggatcggcatatccatctgaccaccgaagacagtcgcaacgtgattttcctgcatccgcgcgatgagcatggtcagacgccgcttttcaccgccgaatggaatgatgattttcacaacgccgcgcatgtcttcgcgaccggggaatcacacgcctattatcaggattttgcctttgagccggagaaaaaactggcgcgggcgctggcagagggctttgtctaccagggggaaatctcgcttcagaccggaaaatcgcgcggggtagagtgtcgcgagcaacctccgcagttttttgtcgattttattcagaatcacgaccaggtcggcaaccgtgcccagggggagaggcttatctctctggcaggcgcggataaaacgcgtgtgctgtttgcggcgctgcttatgtcgcctcatattccgctgctgtttatgggcgaggagtatggcgaaacgcatccgttcctctttttcaccgacttccacggcgacctggcgaaagccgtgcgggaagggcgcgcgaaagagtttaccggccatgccgggcacgatgaaaccgtaccggaccccaatgacgtaaatacctttatgcggtcgaagcttgactggaacaaggcagacacggaggaaggcagggcgtggctgcacgctacgcgcgaactgattgcgctgcgtcagcgctttatcgtcccgctactgaaacagcggggcgccgtggagggtaacgtcctgcaaacggcgctcggcatggtggccgtgagctggcgtttcccgtccggtatgctgtcgctggcgctgaatattggcaaaaagccgctcgccttaccgaacctgcccggaaaaacgatctttagctggccggaggcagtcgataacctgccgccaaacagcattgttgttcgcttagctgatggagaagcagcgctatgatcccttcctctacttaccgaattcagtttcgcaacggcatgaccttcgatcgcgtggtggacctgattccgtatatgaaagaccttggaattagccatctttacgcgtcgcctgttttcaccgcaaccacggattccacccacggctatgacgtgaccgaccccaacgaaatcgacccggcgattggcgggcgggaagggtttgaccgcatggcggcagcgctgaaacaggcggggatggggctgattctggatatcgttcctaaccatatgtcgacctcgctggaaaaccgctggtggcgcgatgttatagaacaaggcaggcagagccgctatgcggcgtattttgatatcgactggtcccgaccgctgacgctgccgtttcttggcgacacctttgaagccgagctggagcggggggttatcaccttaaaacgtgacagtgtcaccaacagcgcagcgctggtttactatgataccgcctatccgcttaatcccggcacgtatgccgaaggcaagagcatcgctgagatccacgaggcgcaaagctggcggctgatgtcctggcgggaagcgccgaaacagctttcatggcggcgcttttttgaaatcaccgggcttgtcggcgtgcgggtagaggatgaggcggtcttcgcagacacgcaccgcctgatccttgagcttgttcacgccggggttgtcgacggcctgcgcattgaccatgtggacgggcttgccgatccgctgggctatttgcagcgcctgcgtgcggcgaccgggccggattgctacatcacggtagagaagatcctcgccaaaggggaacagcttcctccggagtggccggtctcgggtactacgggctatgagtttattgcctcgctggcggaagtgctggtggatgataccaacctctcgcgactggaaacgctctacgacgagacgctgggtacgaccgtggacaggcaggcggaacttcgcaaagccaaagggctgatgaccgatcgtaattttgaaggtgaatttaccacgctgctcaaaatcgccagcgagctggccgggcataacggcgccgaagtggagcatgaggatatccgccatgccctgcgcgagctgcttatcgcgtttccggtgtatcgcacctacggcaccggagaagggctgacgccaccggatgtggcgctgctcagtcgcgtggtcgccagcgtcaacgcctctgaacccgctctcagcctgatcgtgcgtattcttaccggcgatctgcctgaggatgaccacgcgctggcctcgcttttccgcacccgttttcagcaactgaccgggccgctgatggcgaaatcggtagaggatacgctgttcttccgccataacctggagctggccctgaacgaagtcggcgctgacccgacgccgcgcgcgttttcactttcccgttttcatcaggagatgcgtattcgtcttgcccgccagcccgatgcgctgctgggaacctccacccacgacaccaaacgcggcgaggatgcgcgannnnnnnnnnnnnnnnnnnnnnnnnnnnnnnnnnnnnnnnnnnnnnnnnnnnnnnnnnnnnnnnnnnnnnnnnnnnnnnnnnnnnnnnnnnnnnnnnnnnnnnnnnnnnnnnnnnnnnnnnnnnnnnnnnnnnnnnnnnnnnnnnnnnnnnnnnnnnnnnnnnnnnnnnnnnnnnnnnnnnnnnnnnnnnnnnnnnnnnnnnnnnnnnnnnnnnnnnnnnnnnnnnnnnnnnnnnnnnnnnnnnnnnnnnnnnnnnnnnnnnnnnnnnnnnnnnnnnnnnnnnnnnnnnnnnnnnnnnnnnnnnnnnnnnnnnnnnnnnnnnnnnnnnnnnnnnnnnnnnnnnnnnnnnnnnnnnnnnnnnnnnnnnnnnnnnnnnnnnnnnnnnnnnnnnnnnnnnnnnnnnnnnnnnnnnnnnnnnnnnnnnnnnnnnnnnnnnnnnnnnnnnnnnnnnnnnnnnnnnnnnnnnnnnnnnnnnnnnnnnnnnnnnnnnnnnncgactatacacgctgacggaagcgccagatctgtggggggaaaacctggcgcgctggcggcagatgaaccagacgcaggtccgattcctcaacgacggcaccgcgccgaacgccgccgacacctggatgatcttccaggcgctggcgggcgtctggccagccacgctgtcgccagacgatcgtgatggtcttaagtcactggaagagcgtttcctcggctttattgagaaagccctgcgcgaggccaagcagcgtaccgactggatcgacagcaacgaagggtacgagagcgtggtgctggactacgtgcgccatctgctctccccggataacaccctgttcctgcgtgatttcagtgccgcactccagccgtttattcgggctgggttaatgaacagcttgagccagacggtgatcaagctgactgcgccaggcgtaccggacatctaccagggcagcgaagggcttaacttcagcctggtcgacccggataaccgccgcgaaccggatttcaccgcgctggcggaaaacctcagcgtagcggatggaaccatttttaacgatgcgcaacgctggcgagacggcagcgtgaagcagtacgtcaccgccacgctgttacggctgcggccgcattaccccgcgcttttccgctacggcgactggctgccgctgaaggtgaccggcgagcgggaagagaatctgatcgtttatgcccgcataaaagatgacgaggcgctgatcgtcgccgtgccgcgtctggtgtttgacgtcaccgacaatgcgatgctgtgggccaatactacggtggccataccccaggagctggccgggaagcactaccgggatctgtttacgggtgagcgtcgccttctgccagagacgctggatttaacgtctgaaaagggatgtttgttggttctgcttacctgcgaataatcgaggagaacaaaaatgccaaaggatacaacgtttnnnnnnnnnnnnnnnnnnnnnnnnnnnnnnnnnnnnnnnnnnnnnnnnnnnnnnnnnnnnnnnnnnnnnnnnnnnnnnnnnnnnnnnnnnnnnnnnnnnnnnnnnnnnnnnnnnnnnnnnnnnnnnnnnnnnnnnnnnnnnnnnnnnnnnnnnnnnnnnnnnnnnnnnnnnnnnnnnnnnnnnnnnnnnnnnnnnnnnnnnnnnnnnnnnnnnnnnnnnnnnnnnnnnnnnnnnnnnnnnnnnnnnnnnnnnnnnnnnnnnnnnnnnnnnnnnnnnnnnnnnnnnnnnnnnnnnnnnnnnnnnnnnnnnnnnnnnnnnnnnnnnnnnnnnnnnnnnnnnnnnnnnnnnnnnnnnnnnnnnnnnnnnnnnnnnnnnnnnnnnnnnnnnnnnnnnnnnnnnnnnnnnnnnnnnnnnnnnnnnnnnnnnnnnnnnnnnnnnnnnnnnnnnnnnnnnnnnnnnnnnnnnnnnnnnnnnnnnnnnnnnnnnnnnnnnnnnnnnnnnnnnnnnnnnnnnnnnnnnnnnnnnnnnnnnnnnnnnnnnnnnnnnnnnnnnnnnnnnnnnnnnnnnnnnnnnnnnnnnnnnnnnnnnnnnnnnnnnnnnnnnnnnnnnnnnnnnnnnnnnnnnnnnnnnnnnnnnnnnnnnnnnnnnnnnnnnnnnnnnnnnnnnnnnnnnnnnnnnnnnnnnnnnnnnnnnnnnnnnnnnnnnnnnnnnnnnnnnnnnnnnnnnnnnnnnnnnnnnnnnnnnnnnnnnnnnnnnnnnnnnnnnnnnnnnnnnnnnnnnnnnnnnnnnnnnnnnnnnnnnnnnnnnnnnnnnnnnnnnnnnnnnnnnnnnnnnnnnnnnnnnnnnnnnnnnnnnnnnnnnnnnnnnnnnnnnnnnnnnnnnnnnnnnnnnnnnnnnnnnnnnnnnnnnnnnnnnnnnnnnnnnnnnnnnnnnnnnnnnnnnnnnnnnnnnnnnnnnnnnnnnnnnnnnnnnnnnnnnnnnnnnnnnnnnnnnnnnnnnnnnnnnnnnnnnnnnnnnnnnnnnnnnnnnnnnnnnnnnnnnnnnnnnnnnnnnnnnnnnnnnnnnnnnnnnnnnnnnnnnnnnnnnnnnnnnnnnnnnnnnnnnnnnnnnnnnnnnnnnnnnnnnnnnnnnnnnnnnnnnnnnnnnnnnnnnnnnnnnnnnnnnnnnnnnnnnnnnnnnnnnnnnnnnnnnnnnnnnnnnnnnnnnnnnnnnnnnnnnnnnnnnnnnnnnnnnnnnnnnnnnnnnnnnnnnnnnnnnnnnnnnnnnnnnnnnnnnnnnnnnnnnnnnnnnnnnnnnnnnnnnnnnnnnnnnnnnnnnnnnnnnnnnnnnnnnnnnnnnnnnnnnnnnnnnnnnnnnnnnnnnnnnnnnnnnnnnnnnnnnnnnnnnnnnnnnnnnnnnnnnnnnnnnnnnnnnnnnnnnnnnnnnnnnnnnnnnnnnnnnnnnnnnnnnnnnnnnnnnnnnnnnnnnnnnnnnnnnnnnnnnnnnnnnnnnnnnnnnnnnnnnnnnnnnnnnnnnnnnnnnnnnnnnnnnnnnnnnnnnnnnnnnnnnnnnnnnnnnnnnnnnnnnnnnnnnnnnnnnnnnnnnnnnnnnnnnnnnnnnnnnnnnnnnnnnnnnnnnnnnnnnnnnnnnnnnntttaacccgtttgaaggcacggtgccattccagatcccgcagtttggcgaagggggttgggtgctggagctttcgacggcggatgaggcccccacaggggaaatcatcacggaatccgtcgattatgaactggccgggcggagtatgacgcttttccgccgtccttaaagcgaggccgccgcgcgtgcggcggtatcatacagggaggagatcgcgcggagtaactgcgcggtctcgccaattgatgctcccggaatgccgctttccgcatgaatgttgatcaggcaggcctcccgcacctcccggtacttcatgcacagcgcttttccctcctccgtggtggagaaaaaaagctcttttccggctttctcgctcgtgacatatcccgccttgaccagctttttcagcgcatacgtcaccacgtgggtatcttccacgttcagcacaaagcagatgtcggccagctttttcttgcggttgcggtgattcacgtggtgcagaagcgaaacgtcaaaggcccccatatccggttcacccgctgcggtcatgcagcgcaccatccatttgttaaacgcattgctggtcatgatcagcgcatattccagctctgataattcagcacaccgctctgagacgagatgacgggaggagacgattcgcccgtccgcaatatcgtcgtggtttaacgctgtcgtctttttctttactgtcataacaatccttcccccgaaatgtaaacccgtcgataaaataagaacattttattgataaattgtttacatgtttttgacgttcagatatagctttttagtgcaggttctgtggagcctgacgcaaaacacaacatcgcgcgccgtaatgcaccggcttcgctctgctgcgaagtataaaaaatagccgtcggcgcgcaacgctcactttggatagggtaacgtttatggacagttctacactgttgccacttatcgggattccggtggtggttattggttttgcactgcgtttcaacccgctgctggttgtcgtggtggcggggctggcgacgggcctgctggttggcatggatttcggtatgctgctggaaacctttggcgaaaagttcgtgaatagccgatcgcttgccaccttcattctgatcctgccggtgattggcctgctggagtattacgggctgaaagagcgcgcccaggcctgggtcgcgaagatcgccagcgccacctcggcgcgtatcctgatgctctactttgtcgcccgcgaagggacggctgcgctgggcctgatgtcccttggcggccacgcgcaaacggtgcgtccgctgctggcgccgatggcggaaggggcggccctgaatgaatacggcgaactgccgcagactatccgcgacaaaatcaaagcccatgccgccgcgtgtgacaatatcgcggttttctttggggaagatatctttatcgcctttggcgcggtactgctgattgatgcgttcctgaaagagaacgggatcgaggggatcgaaccgctgcatatcggcctgtgggccattccgaccgctattgcggcactgattatccatatgacgcgtctgctgcgcctcgatgccagcattcgtcgcgacgtgatggcctggaaagcagaacagggtacgcaggagatcgcaccatgatgaccctcattaccattaaccgcgtgtactacctgatcggctgcgtcgtgatgctgctggttgtgatgacccttcgcgatcgcgctaacccgaaacgctataccaccgcgctgttctggtttctgttcggcgggatcttcctgtttggcgatctgatggtgcaggagctgggtaagtcgctggcgtatcgcattattggcggcgccgttatcgtgattgcgctgctggccggtttcgggctggtcgggaaggggcattataaaatgtccaccgaggaggagcgtgttgcctcgtcgaaccggctgaaaaactggctgtttttaccggcactgatgatccccgtggtaacggtcatcgggacgctgtttctgaaaggcgtgtcgattggcggcgtttatctgctcgaccagaaacagcttacgctggcggcgctgtgcgtggcatgcgtggcggctatccttaccggctggtggctgacaaaaggtacgccgctgcatgcggtgcgtcagtcgcgtcggctggtcgataccattggctgggcggtgatcctgccgcagatgctcgccatgctcggcggggtgtttgtggtggcgaataccggcgaatcggtacaaaaggtggtcagcctgtttgtgaacccggacagccgcttcatgctggtggtcatttactgcgtggggatggcgctgtttaccatgatcatgggtaatgccttcgcagccttcccggtgttaagcgccggtatcgctctgccattcctgattaacgtccatcacggtaacccggcgccgctgctggctatcggtatgtacgcaggctattgcggcacgctgatgacgccgatggccgccaacttcaacattgtgcccgccgcgctgctggagctaaaagacaaatatcaggttatcaagatccagatcccgaccgcgttaaccctgctggtggtgaacgtgttcttaatgtatttcctcgtgtttcgctaaggagctgcaatggaattaacgcaacatcaggctgacgccttcgccagaatgccgttgacctatttacgtcaggaatacccgaaccacattatgcatctgctcaacgatgacggcgacgttttgccgcctcgcgagctgcacccgatcttttacggctgttttgactggcactctgcggtgcacggctactggctgctgctgcgctgtctgcgtctctggcccgaactgccgtgccgggaagagatcatcactctgttcgaagaacacctgaccgacgagaaggtggcgaaggagctggcctattttaccgcgccgttccgcgcgtcgtttgagcggccttatggctacggctggctgctggcgctggcgcaggagctgaaacagtcgtcactgccacaggcggagcgctggtaccagacgctgcaaccgttaacgcgggatattcgccagcggctggtggattacctcagcaagctcacctatcccatccgcgtcggaacacattacaacacggcgtttgcgctcgcgctggggctggattatgcccgggcggtgacggatgacgggcttgaacaggcgatcctggacgcggcgacgcgcttttatcatacggacacgcaatatccggcgcattatgagccgggcggcgacgagtatatctccggggcgctgaccgaggcgttactgatgagtaaggtggtggagaatttcccggcctggttcgatgcgtttctgccggaagtgggtgccgtttctgcgctgatgaacccggctgaggtaagcgaccgcaccgacccgaaaatcgcacatctggacgggcttaacctcagccgcgcgtggtgtatgaagcacattgcccgtgctctgccggaaaaccacccggcgcagcaggcgttacaggatgccgttgcgcgccatctctcggcaagcgtggagcatgttgtcggcagtcactacagcggcggccactggctggcgagttttgcgctgctggcgctggagtagcgcttagttatattttcgtgctcatcctgtttccgcaggatgagtgattttacgcaaccggctcgcgctgacgacgaccgctaccgcagaagctgcggcggcgacccacagcgcaacatgaattgacctttcatctgcggccagcagaacggccacggcggcggcgcccagacactgcccgaacgtgcgcataatggataaaacaccggatgcatagctcgcatgctcacgaataacgttggaaagcatttcccggttattgggactctgaaagcagccaaaccccattccgcacaccagacttcgcaggcagatatcccacactgaagggcggtcgggtaatgtcgccagcaggatcaaacccacgacaaaaatcaccagccccagggtggatatcgccggggctgaaatcgagtccgcccaccggcctgcatgcggcgcaatcagtacgatccctagcggccacggcgtaaacagcagggcagacaacaccgggctgtagccgtattcgctctgaaacaggaaaggcagtgcaacaaaggtgatcccctggctgacaaaagcaatcatcgacgtgaaggccgcgagggtaaaacgttcatttttaaacatcatcggcggcagtaaggggttatccgcgcggcggatctgccagataaacgccatgccgctcagcgcagcgagcattgtccagcaaaggctacggaggtgataagtcgcctcctggaggctgtttgccgccatgatcgtcgaccccagcagcagcgccgacaatatggcgcccggggtgtcgaagggcgcctgctttcgaaccgcatcccgcggcagcgctttgaccgccagcagtaaggcgagggtgccgggaacaacgtttatcgcaaacagccattgccagctcagggtgtgaaggatcgtcccgcccaataccgggccgatagcggagctggaggcgatgagcagggcgtgcaaccccagaatgcggccaagcaatcgcccgggaaatacggaccgcaggattgcgggggcaatactcagcgtcgccgcgccgccgatcccctgaagcacgcgcataccgataagcacttcgggtgtattcgccagcgcgcaacccagtgatgtcagggtaaaggtcgtcagacctgcgagaaatacggggcgataacccaggcgggccgcaagcgccgcgaatatcgccagcgtcatcgcagccgccagcagatacccgttggcgaaccagacggcaatactggcaggtacctgcatctcctgagccatggagggcagggcaatgttgatcatggtgccatcaaacacgcccattaaggtggtggtcataattgcggccatcacccgtgcgcgcgccggaccgggcagtccttcgtcgccgggttgactggaaaagagcatcatcatgttgtcctctgagaagagtgtatggatgacaaaactataaagatggcttttacagggcggaaggcgcaccatttgcactttatcgttgcacgaaacgccttatctgaatgaacaggaatgagcgctatgaccgatcctgattttaatttactgattgcactcgacatattgctgagcgaagcgagtgtcgcaggtgcagcacgtcgtctgaacctcagcacctcggccatgagccggacattaagcaggttacgcgacgttacaggcgacccgatcctggtgcgcgccggacgtaacatggtactaaccccgtgggccgaagcgacccgggatcgcgccaggcgtgcagtgcacgaggcgagggcggtattgcagccctcaactgaaacgttcagtgcgcaaagtctggcgcgcctttttaccatcagggcaaacgatggttttgtggtggcgtttgggcctgcgcttatagcggctgtggccgacgccgcgccggacgtctgtatacgctttgcgcctaagccggaaaaaacgtcgcgctatcttcgggaagggctggttgatctggagattggcgtccagagcaatatggggcctgaaatacggctgcaacgactgtttgaggatcggtttgtgggcgtcgtgcgtaagggacacccgctggctaagcaggcagaaataggcgtgaaggattatgtcgcctggggccatgtggtagcgtcacccgagggcgcgttgcacggttccgttgacgatgcgctggccgaactggggacaaaacgtaaaatcgccagcgtcgtaccgggatttccgacggcactgtccgtggcgctggaatcggatcttatcaccatgatacccgcgctctatttactcaatcagcaggtaacggaccaggtacatctgttcgagttgccgttcaaaagccgtcgtattacggtatcgcagatgtggcacccaagaatggaacgcgaccctggtcaccgctggctgagagagcaaattcttgcgatatgcggtgtggagaggtcagacataatttcgggctctgtatagcgattgctatacacaccgcttatgctatgcttgtaaagcaattgctatacaagaggtatacctatgaaatcagatgttcaactcaatctcagagccaaagaatcccagcgggcgcttatcgatgccgccgcagagatcctccataaatcacgcacggacttcattctggagatggcctgtcaggcagccgagaatgtgatcctcgatcgacgtgtattcaattttaacgatgaacagtacgcagagttcattgacatgctcgatgccccggtcgcggacgatcctgccatagaaaaactgctggcaaggaaaccgcagtgggacgtgtaacagcaccagagcccttatccagcgtccatcaactggcggagttcgtcagcggagaggccgtgcttgacgaatggctaaaacaaagaggtctgaaaaaccaggcgctcggcgcagcccgaacgtttgtcgtttgtaaaacgggcacgaagcaggtcgcgggattttactcgctggctaccggcagtgttaaccatacgcaagcgacggggaatctgcggcgtaacatgccggatcccatacccgtgattatacttgcccgtctggctgtggatgtctcgttacgcggaaacgggttgggagccgatttactccacgatgcggttttacgctgttatcgggtagcagagaatatcggggtgcgggcgatcatggttcatgcactcactgaggaagccaaagcgttttatatccaccatggttttaaagcatcgcagactcaggaacggacactgtttctccggcttcctcagtagaggcaaagggagggggtaggatgcgatgggcttatctgacgagggataggctccataatatcttatttaacataatatacattatgcgcactaaggttgtaacagcaaaattgtaatgtccgttctgggataaggataagttaagtgtacatcacatagattcaccatcgagggattctgatgacggcacacgcagcggagtttttcactatggacaaagttaaccgactcaaaatcattcaggacgttgtcgtccagcctctgaccacactgatggccgcgcagcgccttgatatttcagacagtcacagccaacgccttctgttgcgttacaatgaatctggcccactgggtatggctggccgtcgtcgcgggaaacccggcaataatcaactaccggatggtcttgcccggtacgcattcaatattatccgcgaaagctatactgactttgggcctacgctgccagcgaggaacacgaagaactgcacgatgttcacctgtcaaaatattgggaagtacattgaggtctggcattacccggatggccggaaagaactcaggctaaacggagtcatccttccctacttcacttataatcgtattcaggaaattgattaggctgctatcgtggacaacaagcgcctcgggcagattccttagtttattaagctggttcaggacaaacgttagaagattatttatactctgaattctttttccggtagtgagtgacctgtatggaagaatgataaatgcccgacatgagcgaagaacggaagttctgaatgctactaacattgagatgccttgagtcataacaagcaagtcaacatagttggcttaaggataatgatcaatttcagctgataactaataaatggaaatgttttactataataaaatgtggttttgaggggttagggattgaacttatatgaaattttatagcatagattatctacaaatgcagtctaatatcaatgattatttaaaatacatagttatatttagtactttatttatcttgatcgttgtttttagcctgtatatgcgtcatcgcctgcaaaccaaatatcgtgacttaacaatcatagttttcttgtttttgctcttcatttctggtgttcagtatgctgattatactgatagtcaaaatatacattcccaatcctcgcaaatnnnnnnnnnnnnnnnnnnnnnnnnnnnnnnnnnnnnnnnnnnnnnnnnnnnnnnnnnnnnnnnnnnnnnnnnnnnnnnnnnnnnnnnnnnnnnnnnnnnnnnnnnnnnnnnnnnnnnnnnnnnnnnnnnnnnnnnnnnnnnnnnnnnnnnnnnnnnnnnnnnnnnnnnnnnnnnnnnnnnnnnnnnnnnnnnnnnnnnnnnnnnnnnnnnnnnnnnnnnnnnnnnnnnnnnnnnnnnnnnnnnnnnnnnnnnnnnnnnnnnnnnnnnnnnnnnnnnnnnnnnnnnnnnnnnnnnnnnnnnnnnnnnnnnnnnnnnnnnnnnnnnnnnnnnnnnnnnnnnnnnnnnnnnnnnnnnnnnnnnnnnnnnnnnnnnnnnnnnnnnnnnnnnnnnnnnnnnnnnnnnnnnnnnnnnnnnnnnnnnnnnnnnnnnnnnnnnnnnnnnnnnnnnnnnnnnnnnnnnnnnnnnnnnnnnnnnnnnnnnnnnnnnnnnnnnnnnnnnnnnnnnnnnnnnnnnnnnnnnnnnnnnnnnnnnnnnnnnnnnnnnnnnnnnnnnnnnnnnnnatgttttttatcgcgtcaatttgagcccggatcaaaaaacatacaatttagtagaggtttcgttagtaaacccagaaatagaaatcataacaaactgaggtgtggaaatgataatttatttacctatcattataaagttgggcctggggatactgtgtttaattgttcaaataaatcttatgggaaaaggaaatctggccccctcatctgcaatggaccaggttcaaaactatgtgctggggggaattataggaggcgtaatttacaacgaatctatatcggttcttcaatttattctggtactaatcatatggactcttttggtcttcgctcttaaattcctgaaggaaaacaatcgattaattaaaaggataattgatgggaaaccgattaccttagtacacaatggcagtgttaatgttaaggagtgtttacggaatggtgtttctgcaaatgatctaatgttcaaattaagagcaaatggaatttatgagatagaacaactaaaacgcgtcgttctcgaacaaaatgggcaattaaccatcatacaaagtggcgatgaaaatatacgctatccaattatagtggacggtttggccaaccatgacctgctagaaatccttaataaagacagtgaatggttagaaactgaagttacaaagaaaggcttcagtaaaattagtgaagtatatttaggtgagtacttgtcaggtaggattaatttatacggatatgaaaaataacatccaaacaataacaccattttatcaggaggcagccatttctggtgtgcctccgcctgagaatattgacattaacgtccgctcctggcacagatcaaatatttgagctttgcgctgccccgggcatctgaacttggctttgacaatgatgtggagactcaatattaatctaaaacgttatgattaagagaacatattttttgttctcgccagcaggaatgccgtaactgaggtggcgtcagtgattttgccgtcacgtattaattgagcaaaggcactaattttaatttttttcaccgtcaggccgtattcttcctcctccagttgctggccggtaaatgtcagctccgtggcaaggtaaatatgataaccctgggctgaataaccctgtgcgagcttttgataaccgacgtactccattttcccggcgcttaacccggtttcttctttaagctcgcctctggcaacgtcttcaggtgcagcgtcgcgagaacattcccaacttccctgagggagttctgtggttctctggcccagagggtatcggtattgttcaaccagatagatttcatcattctcaaccggaatgatgaccacgaaatcatctttttcaatgacggaataaagcccctcgctcccattggctctcagaatccggtcttcctttagcgacatccagcggttacgataaatctgtctcgattccagtgtttttatctctttcttcacggtaagcccctgatttctttgcttgtagctctctaacagtaacgttaacgccttcagcgtgcaatacatcaacgctcataactgtcgttacagtcttgcgtgttctctacggcagtcacctgcacatccttgaagcgcaacccatccacaccggaaattttcccgaactctgacgcgtcaatcaaaattccgtccagtgttaatccggtcacaggacgctccggatacccctcaatgaaaaatgcccgcgagaaatatttgttgtctgagcgatgcgccgacatatttttaatcgtcagtccgctgaccgcagtaagaccggcttcgccctcaacaccttcagccagcttgcgccagtgttctggtttatcagataaatttccccggtcgccatagctgtactgcggaaaccagttcagctggatcagcaccggaaaacgcacgtccgtaagatgtaaattttggacggtgatatcacggataaatccgccccggttgcgggccgacttaatgcgaaacccgacgcccgtaccgttaaacgcgttatcttctatcaggacgcgttcaatgccgcctgaggtttcgctccccagcgtgatcccggaccccttattcagcgtacaaccgcgaatcacgatatcccgtgcggtacgtgctttttgcgccgcttcgcgtcctcgtcctgatttgatgcagatattgtcgtcattacaggaaacaatgcagcgttcaactcgcacctgttcacaggaatcgatatcaatcccgtcggtgctcggccccgcagaattgctgatttgcacgccctcaaccgtgatacggcgcgaataacagaggtgcatgttccagaatccggactcccgactggtaaaatcacgcagcagaatgctctggctttcaaagaccaggatattgcgcggacgctgacagtcgtaatcaaccacccagcgcaatcctctggcgctgtaatcgccgaccatgccgctgcgctcgtcatcgccccagaagcgttgccaccagataacaccctgcccgtctatcgtgcctgtaccggtaatgctgacgttttcacaatcgatgatattaataatgcctgccggccagcgcatatcaatgccggccacccgggtatttatcaggggataatcagccagatcctggctgccaacgagctgtgcgcccgcgtccaggcgaagcgaaacaccgcttttcagaaacagtgcgccggtcagaaaacggccttgcggaataacaatgacatcgttctgttgagcactatttatggcctgctgaatggcagacgttgacaggcgttgcgcggttgggtccgcgccgcacgccagaatggagatcgctttcatggcttgtccttaaacagatgaaagccttagtctagaaatccgcgtgaaggataacctttgtctgtttgacagccacgcggtcaggctggcaaaaaaacagatatttactggcttgcgatcaccgcaacgcccttttctttcagagcgctcacccagcgttcatccgttgtgttttcaacaaccagcgtattcaccagcgacaggtcgccaatcacaaacgccgaggccgtgttgatcttttccggtgaggccaataccaccgtttccgccgctctgccggaaaatgcacgtttgatgcacgcttcttcgtaatctccggtggtcagcccggcctcaggatggacgccggtgacccccatgaagaacagatccgcatgaatattattgatgccttcaatagcggccgcgccgaccgtgacgatggagtgtttatacaaacgaccaccaatcaggatcacctctatgcatggatggtcgaccagccccaaagcgatacccgggctgtgcgtcaccacggttatccgtaaatcgggtggtaagaacgtaataagttcggaggtggtcgtcccgccatcaatgatcaccacctgccccggtgaaatgagctgcgcgcctcgccgtgccacgcgtttttttgcatccattttaacggactgacgctcggcaaaaggcgcaatcgctgacgatgctggcagtgcgccgccgtgaacacgctgcaaacgcccttctgccgccagttcacgtaaatcccggcggatagtgtcctcagacaccgagaaaaagaggctgagcgcagtagactggacctgaccttccgcctccagtttttccagaatcaactgtttacgctggcttgtgagcatgaattattcctgttgttgcacgatacgccttgtatttgcacgatagtgctgtttatgatgcttactctacgagaggagagccaaacgtgcaatcaaaacgtgcagatatacgcatcatcaacagcgaaacgttgtccgacaactggtataacctgaaaaaatacatttttgacctcaagcgcagcgatggcgactggcagcgacaagagcgtgaagtgtatgaccgggggaatggcgcgacgatcctgctctataatcgcgacagcaaaaccgtcattctgacgcgtcagttccgtttcccggtgtttataaatggtcacgaagaggatctcattgaggcggccgccgggttgctcgataaccttgacccggaaagccggattaaggccgaagcggaagaagaaaccgggtataaggtgacgcgcgtagagaaaatttttgaggcctatatgagcccgggctcggttaccgagaaactctacttctatctggcggaatatcacccgcaggatcggaccagcgcaggcggcggcgttaaagcagagggagaagatatcgacgtactggaaatgacgctggacgacgcgcttcggagcattgaaaatgggcagattgtcgacggaaaaaccatcatgctgctctatcacctggccctgaaaggcattttataatctcaccattagccagatacctgccccggcgcaggtatttgcctgtgctattcttgctgaacacctcaacatggagatgcgaaaatggccgactgggatccctctctttatctacagtacagcgcagaacgcacacgtcccgccgctgagttactcgcccgggtgccgcttgctgacataacctctggcgtggatttgggctgcgggccaggcaacagcaccgcgctgctgaaacagcgctggccttctgcgcagatcgccggcgtggataattccccggccatgctggaggaagcccgacaggccctgccagactgccactttgttgaggcggatatccggcactacaaacctgaccagccgctcagcctgatctacgccaacgcctcactgcaatggatcccggaccattaccaccttctgccacacctggtttcgctgctccagttaaacggcgtgctggcggtgcaaatgcctgacaactggcttgagccgacgcacgccctgatgcgtgaagttgcctgggaacagggctaccccgatcgtggccgcgagccattgccgggtatccatgcctactacgatattctgacggaagcgggatgcgacgtggatatctggcgcaccacctacttccatcagatgagctctcatcaggcgattattgactgggtcagcgcgacggggttacggccgtggttacaggaactcaacgaaagcgagcagaaaaactatctgaaacgctaccttgagctgctggaagagcagtatccgctccaggagaacgggcagatactgctggcttttccgcgcctgtttatggtggctcagcgggttccgtaagccggatcaggaacgcgcttccttgagcaactgctgaatcacggcctcctgcttgtcgtagttcccctcgccaaacgcggtgtaacgcagttgccctttcgcatcgaaatagtaatgtgctggccagtactgatttccgaacgcgctccagattttgtaattattatccgtcactacgcggtacggcagctgccatttattgaccgcgtttttcacagatgataacggcttttcccaggggtattccggggtgtggacaccaatcaccaccagaccttcagactgatatttcttcgcccagtcacgcacatgcggaagggtatgctggcagttgatacagtcccaggtccagaaatcgataagcacaactttcccgcgcaaggcctcagacgtgacagggtcaccgtttacccaacccgtaccgccgcttaatgacggtagctggctgcccggcgtcgcgtcagcgaccggttgcagtttcacctgcgtggaggttggttgcgcaaggctcaacagggcgttttccagctggtcggcaacaccgttggcgcctttcagggctgaggtcattccgctggcgttgaacgcaacggcggctaacatcatcactcccgctccctgacgcaaacgtgccatcaatgcggatttggctctcagaggggttatcagcttacggccccccgcgacaagcagccccagcatcaacgcgcacccgctgccgtaagcggctaacagcgctccggttgcgatggccgagtggcccgcaatattaatgctgaagatcgccccgagaatcggtccggcacagggggaccacagcagcccaacggccagccctgccagaaaagccgaaaccagaccgcgtcgctgcatgctgtgggtattgagaacgtttcccgcgctgaccgccgggcgggcaatgcgctgagcgaactgcgggaagatcagggccagggcggcaatgctcagtaccagcagcgcaatccagcgaccgataacggtggcgtcagcgatccactcgctggcaaccgttactaccatcgccaccaacatgaacatcacaatcattcccgccaggagcgccagaatgtgtttgcgctgcccctgaaagccggcgaacagcagaggaatgacgggaagcgtgcacggactgagcagactaatcatgccgacctaaaaaagcgattatcataaacataacgacctcacgatacggttgctgcgaagatgcagtgaggtcatttcatcgtacgaatgtgttcaggccgtgtgtgaaaagctggattttgtctgcctgcgtatcggcgcggggtgcagatacacaggcgtacaattaaccgcgcggaaggatcacgcttacggccagccctccctctgcccggtttgcaagatgcaatttcccgtcaagctgggcggtgagctgcgcggcaatggcgaggcctaacccggtgccgcccgtttcccggttgcgcgacgtttcaacccggtagaacggctgtaacaccgcctccacttctgcctccgggatgccagggccgttatccataatgcggatcgctacctgcctttcattttcatcaatctctattaccgcgctctcgccaaacttcagcgcattatcgagcagattggtcattaccctgcgcaatgcctggggacgagtgacgatcggcagacgcgcattgcgtgcatgaaactgcacgtttttaccaatgtcctgataatcactggcgatgctgttaacccacgcattcagctccagcttcagcgtggtctcttccagagattctgatgaccgggcataggcaatcccctcccgtaccaggcgcgacatattatccaggtcgctcagcagcttatcgcggagttcgggctgatccgccatttcgatccgcagcttcatgcgcgtgatgggcgtctggagatcgtgagaaatggccgccagaatctgcgcgcgttcacgcagataggtctgtatccgcgactgcatctcattaaaagcgtgcgctgcctggcgcacctcaaccggacctttttcagtcatcggagaatgggccgcaggatcgagggaatcaaccgcgcgcgtgaattgcaggaagggccggacaacctggcgcacggcaatccaggagcagagcgcgacaagtaacagctgaagaaccagcaccacgggcagccagctggcgacaggcggcatgcgcgggatcagatcgatagtgagcggtgcgccgtcgcggagcgtcagatgggcctgaatatgggaaacaggccccggcaccgccgtaaactgaagcggatattgggctgaaagcgtctctttcagagttcgaatcgcatcccgcgagcgcttgtccgttggcgcggcgcctgcctcgccggggccaaggatataacgataattaccgcgactgagccgttccagccactctggccgctctttggccggaagccggtcgagaatggccacgctggtcgccacgtcgttctcaagattgcccagcataaccgtgcgcgcgctgcgcattcgctcaaccatgaccagcgtcaggctgagcgcgttagccaacaagagtccaagcagcacaatgatcagcagccgggcgagtaaggtgcggggccacagcgtcattcattggcctcgacgatggtcaccggcatggtaaaaacgtagccttcgctgcgaacggttttaatgtaggcgggcgtgcgggcatcttcattcagacgctgtcgcacgcggctcaccaggagatcaatcgaacgctcaaacagctcggcatcacgtccctgcgtcaggttcagcagctggtcgcgggtcagcacccgttgaggatgatcgaggaatacgcgcaaaaggcgatattccgccccgctgagcgccacaaccataccctcgttatcaatcagatgacgcgccacggtatccagctgccattcaccgaacaccaccaggcgccctgcctcggtcacctgaagattaggcggcatagtacgaaaacgacgcaggatggctttgattcgcgccagcagttcgcgggccacaaacggtttcaccacgtaatcgtcggcgcccatctccagccccaggatgcggtccgtgtcctcgttgcgcgcggtgagcatcaggatcggcagatccttatgcctgctgctgcgcagctgtcgacacagcgtcaggccatcatcgccgggcatcatcacgtccagcaccaccaggtcgatatgctgtttgtcgagcactacgcgcatctctttcccgttcgccgcaccagaggcgtgatagccggatttcacgaggtaatcgacaatcagttcacgaatatccctgtcgtcatcgacgacaaggatgtgatcaatatgctccaccgcaggctcctgattaagaggtaacggattgaaaatagcacatatcagagcttatccgcgtcgacaactgctttaacaaagtcctgcggatcttcctgcggcgggttgtggccaaccgttgcgccgaaagtacggtgctcatattttccggtgaatttccccgcataggctgcgggtgcaggatgtggtgccccgttgttaccgccctcgatggtgatggtcggcaccgtaatgttcggcagcttagccagcttttgttcgtaggcgtcatatttctgctcccccttctccagccccagacgccagcggtaattactgagcgtgacggcaacgtggtccgggttatcgagggatttggcgctcgcattgaaggtggcatcgctgaatttccagtcaggcgaagcctgggaccaaatcaaccgggcaaaatcgtgcgtatttttagcatagccttccgcaccgcgcggcgttgcgaaatagaactgataccaccactgaacctctgccttcggcggtaaaggctgtttgccaatcgcctggctgctgatcaggtagccactcaccgagaccagcgatttcacgcgttccggccagagcgccgcaacgatatccgcggtacgcgccccccagtcataaccggcaaacaccgcctgtttgatgttcagggcgtccatcagattaacgatatctttcgccattgccgaaggctggccgtttcgcggtgttttatcagaaataaagcgcgtggtgccgtacccgcgcagggacggcacaatgacacgataccctttcgcggccagcgcgggggccacttcagcgtagctgtgaatgtcgtacggccagccatgcagcaggatcaccggttgcccctctttcggcccgatatcgacataaccgacgttaagatcgccagcgttaatctgttttacctggttgaaggccgacgcgtaatccttgcccatcgcttccgcctgacaggacatcacggtgccaagcgaaacggtcagggcgactgctgagtatgcgagtttgttaaacatgatgttatctccgggtgagttcagttgacggagatataacaccatgcgtttgtataaaggatgtgtgcggatgcggctttattgcatacctgtgtatgtatcacagacgcagatacagtgtgatacaaacccggttaaggggtgattcggtaccggacgtaatcgtcggcttcaccatagtggtcatacagcttacgcgccggattgtgcatgcgggttacccagtagagttttgaccacccttcccgcttaccctcatcgatcagggcgtcgataagcgctttacccgcccctgcgccacgttcggcagcgtcaacaaatagatcttccagatagcaaacgggcgcggttgaccaggtcccttcatgcaggacacacatggcgaagccgatgacgctgccgtctttctccacgacccggcaaaacaggggtgatgaatctgcgagcgccctgtcccaggtggccgtggtaacggactcgtcaaggtagcactcataaaaatgggtatagccatcccacagcggtcgccattgtgggtaatcttctgcgcataaagggcgtacggttagcgtcatctgttctgaccttacaaatcaattgccatttcaatacagcgtaaatgcgcgtcggccatacgcgagtaatgcgtattttcacccagcatggcaaaacccactagattttgcagccatggcgaatcgcttcgttacggacgtgccagagtgtttcggcttcttcgggcctggcttttctcagcatcatataaccccttttatggataaacctgaataacaaaagcacgaccaaatagaatgtgatattgatgaaaataccagaacccaaacaaaagcataacgcttaattatggagatcagcggatgaccatacccacgcttaccaccgagcgcctgatattacgccccctgcttgcagaagatgccgtccagatccagcaacgctatccccgctgggagattgtccgctatatggtggcttcagtcccctggccctacccggaaaacggtgctgaaaactacgtcaacaacgttgcactgcccgacatggacaaagggattgcgtggttctggacgattcgccgtcgcgaagcgcctgacgaactgatgggggtgatttgcctgtatgacgtggaggacaacaaccggggcttctggcttgcgccggaatttcagggccagggatatatgcgcgaggcgagtattgcggccacggattactggttcaatacgcttaacaaaccggtgttgcgcgcgccgaaagcggcggccaacagccgctcccgacgtatttcagacagcagcggcatgcggctcatcaggacggagaagaaagcctatgtcagcggcctgctggattcggagctgtgggaaatcacccgcgacgagtggaatgcccgtcaggtcagctgataatgcttatcaggcatcagtctttcagggatgttctcttcatcgttcatctgcaacagatcgcgctccatcatgttgcagatggcgtccagcggcagatcgttatcttctgtcccaaacggatcttccagctcttccgccagcgtgtccagcgagataaaggtgtaggaaatcagcgcagagacaaagggcgtcatgtaatgcagatcaactaccagcgcaaacggcagcatgatgcagaacagatacaccgtccggtgcaggatcagcgtataggcaaacgggactggcgtattggcgatacgctcacagccagccagcacgatggacatatcattcaggcggttgttaaggctgtgaaacagaatgtctgaaaggtgcccgctacgccgccgtacggccagccactcccccatgatcagcaggatacggttcgccggcgagttggcgtccatcactttgcgtaaatcgtctggagccagatagcgggacagctgatcggcattggtttctctgcgcagggtcatacgcagacagttagcaaacgcgatttgcaggcggacaaactctccaagatgtttatcatccggcaaggtgttttttacctcgcgaaacagcgagcgcgccgctatcatcaactgcccccaaagcagacgcgcctcaacgtagcgcgaataacaggcgttattgcgaaatcccaggaagatggcgatagccacgcccagaatgctgaacggcgcgacggtaaaccggatacccagcgaggtgtaccacggcagcatgacaatcacggcgatggaaagcaggaagttaagcagcagtcgggtataaattttgggaagtaccgaaccatgccagacaaaaatcagttgcagccagtgctgttgaggacgaacaatcataatcagcttcagaaaagtaaagagcgcggctattaaacgtgatccacctcacggttgcaagcatgttaatagttcattgcattttctgacctgttaagcctcaaccgcacggtgctgcatgtgctttttaaaaaaagaacgtatagtatgttgtaactaaaagtagtctgtaaaaaacccggccaacgccgggcattatgattagcagagcggttttaccgcatcgcgcatgcctttgcttaaaattgcatccagatccagcacaacctggtctaccagtccgttcaccagagtgagatcctgtacccagtgctcgctcacgcttaacactgacgataccagttcacgggtagtgacctgtttgtcgtgatgttgcgtccacaactgctggtaacgttcaagccagtgcgcatcgtcctgcaccggatagcgctcaccgttgcgctcggcacggtaaaatgcaatcagcgccgccagagcaaaggtcagacgtgctggcagtttgccggtcgccttctgccctgccagcagttgcggcagaatgcgggtgcggtacttggtcatcccgttcagggcaatcgacagcagctgatgcttaatgtacggatttcggaaacgccccgttacggcactggcgaaggagtgcagctcgtcgcgcggcagatccaggaccggaataatctcctcataaatagccttctctacgaacgcgcaaatttccgcgtcgttcatggcttcccctaccgtatccaggccggcctgaaaagcgaccggaaccagcgccgtgtgcgcgccgttgaggatcgccaccttacgctctttatacggtttgatatcgtcaacaatcaggacgttgagtgggtatttatccaggcgcagttcagctgcaagtgatttcggcccctgaataacaaacagatagaaatgttccgccgtgtcgaggaagctgtcgtgatagcccagcccggcttccagctctgccacctcatcacgcggatagccggtaacaatgcggtcaaccagcgtcgaacagaaagtgttagcatcattcagccacgcaatgaatgccgccggcagcgcccactcctgtgcatagcgcagcaccagttcacgcagggcatcgccgttgtagtcgatgagttcgcaaggaatgataatccagcctttatccgctgccccgttaaagtgggtaaaacgctcgaacagcagacgcgtcagtttggccggatagctgaccgctggcgaatcgtcaaacttatcccccgcgtgatagctgatccccgcctccgtggtattggagaagacaaaccgcatgtccgggttatgggcgagcttcagaaattcatcgtactggctgtagacgctgatttcacgattcacggaacgaataagacgcgcatcgcttaccgcttccccctgctcattcagaccgcgaataatcgttgtatacagaccatcctgggtgctcagggacggcggaaaatcgctctggatcggccgcacaatcaccacaccggcattgagattggtatgctcgtttaagaggtcgatttgccagtcaacgaacgcgcgcaggaagttaccttcgccaaactggatgatacgttcaggatagcgcgcaccggggaaatcacgacggttgagtgtgttcacaatggaggtcctttatgattagtcatacagcctgataagattggtgtgataacttatcaaaacttcaggaccataacccctgtctggatcaactcaggatgcgatggtgaaaaataatcacagaaatttatagaacaccgaggtcgccgtcatgtccccgttcggcatcagggcgtagcgtgggatctcccccgccttttgccagcctgctctctggtaaaacgtctccgcgccgctgccggttgaggtatcaagcaccagtaccgtaagcgctttttcacgtgcaaccgcctccagggcttccatcagcgccattgctgcccctttacggcgtgccttctcatgaaccagcagtttcgcgacatctgcgcggtgcggctggttttcaggctgatcggtgatcagctggaccgtgccaatcagcccctgctcctcatcgaaacagcccaatacagtgcgctcgtcgcgcccgacgctttctgcgacgctgagccagaacgcatgggctttcccggaagaaaaaggcagcataaagctgacggaggcgccgccgttgacacagctgacgagaatatcgttcagggcagtgatgtgggtaagaatgtcctgccgggagagaggtttaatcagcatgggagagttcatcgcgcgtccttaggttgaatctctccactttgctattaacatttttgtaacgcaataagcaatgacataggatttcgttatgtcatttttcgccgtggtgttgccgcttcatggcgtacatctgcgcatccgcatgctttaaccacgcctgcatatcgttacggtgatgatcgaactcgcttaacccccaggagaactgtaacgaccagggatgcagctggcgcacgttgtaattttccgtttgttcgacaagatactgcatagcgatccaggcgccaggctcatcggtatccgcaaacagtaccgcgaactcatctcccccgaaacgtaccagcagatcggcctcgcggaatgaggaacgcatcagggcggccatcgctttcagggctttgtcgccctcctggtgcccgaagcgatcgttaatcgatttgaaatggtccagatccagccagccaagcgttaacggttctgcccgacgctgcgaaaccgacagcgcaaactgcgcaaactggttaaacccgcgacggttaaacagccccgtaagctcatcggtcgtggccgcgcttacggctgcaaactcatcctctgccagtgcgctgagatcggccattacggcggaatccgccgccgaaaactcacgcggtgcgtaatcaatgagacacaacgagcctacgcacgccccgtcacgtaaacgcagcgggtaaccggcataaaagcgcacgccaggctctcccgccacctgcgggttgtccgcaaagcgttcgtccagcagcgtgtcactcaccaccagcggcgcgtcacccaggatcgtatgaccacaaaacgagagatcgcgaggctgggtggcaggtacctggccgtcggcagacttcacgatcgcggcgtggtcatccaccagcgtaatcattgccagcggcaccctgaaaaagcgtgttgccagacgcgtcagacggtcaaacgcgggataattgtcgatctcaagcagaccggactcgcgcagtgcattcatgcgctccgtttcattaacgggaattaaaggtgctttcataacgtctcctgacgctgagcattagtaaaagcgtagcttaaacagagacattgtcagttcatgaggcacgatttacctcaatgaccagccaatgatggatcacgttgacgatatactgttgttgctgcgcattcagcggcacgccctgcgggatagcatgccacttagccagacagccccgacagcaggttgccgtggcatgctgggcgataaagaccggatgtccacgcatcggcgtctgcttaccgtcatttaccgggtgtgcaggtgccagtcgcgcggcgacaaaatcggcggcatgcttatcgatagtctccgcgcccttatcccagcagtattgccgctctttcgttcctaaatgaaaacgcgaacgaaacgtggagcgagccaggcgcgcgaacagaggatctaacgtggacatcagtatacggaccgtccaaggcgtttggtcagctgttccagcgccgccacgcccgccagtgaatttccggtctcgtccagttccgggctccagacggcaatcgccatctcgtgagggacaatcgccacgaccccaccgccaacgccggatttagccggcagccccacgcgccaggcaaactccccggcattctgatacatcccgctggttgccattaaggcgttgatctgccgggcctgcatcggggagacaacgtcctcgcccagatgcggggcatggccctgatgcgccagaaacagaaaagtctgcgccagttcgacgcagttcatcttcagcgcgcagtaatgaaaatagttttgcagcaccgtggcgacgtcattatgaaagttgccgaaggacttcatcagccaggcgatggcggcgttacgtgcagagtgttcaaactcagagcgcgctaccaccggatcgtaggcgatgtcctgcacgccggaaagctgccgcacaatctggagcatccgctggcgcggcgcgctcagccggctttgcagcatatcgcacaccaccagcgccccggcgttaataaacgggttacgcggcttaccctgttcgatttccagctggagaagggagttgaacggctgaccggacggatctttgcccacccgctgccagatctcctgctcgtcatactggcgcatggcggcaacgaggctaagcacttttgagatcgactgaatcgaaaagcgctcaagcgcgtctcccgcctgaaaacgctgaccgtcgacagtacaaatggcgataccgagcttattaccgctgatcgaagccagcgcgggaatgtaatcggcaaccttaccctgccccagtaacggacgaacctgcgccagaatctcgtccagcatctcattatggatgaccgcagccacactttgctccttgccctcaggctaaaacgggctgcgagtataacagaggctgatacgtcacgtcaggcagggagacgaaaacgcgagacggcctgcaacaaaagatcggactgctgatgcaggcgctcagaggcatttgacgcttcgctaaccagcacatctgtccgacgcgatacctgattcagcgcctgaagctgacgggtcatctgatgaatgctgtccccctgattcagggtagccagcgaaatatcattcagcaggctgctcagattcgccaccagcccggtgacctgttgcaaattctcttccagacggtttaccacctgagaaccttcttcaatgccctgtagcgagtggttaattagcgcctggatggtttgcgtagagtgactgctttttctggccaacagccccacttcccgggcaaccaccgcaaatccgcgcccctgctctcctgcatgggcggcttcaatggcagcgttgagggcgagaatgttggtctgaaacgccacgctgtcgatcatcgcgacgatcccgcgcatctctgaggatcggtcgacgatcgtctgcatcgagccattcaccgctgacatcatttgctccccaccagcggcagcctgtcgggcttcatccgcgcgcgagcgggcgagttttgcataacccgtgttcccctcaacgtgggtttcgagatcggcgatgtgtgcggtcacctcctccagctctttggcctgtcgcgtagactgctgataaagcttctgattcccctgcgcaagcgatccgatattttcaaccatggaggtagtggcctcgctgacctgggtcaccagttgctggagcccgagctgcatggcggtaatactgccgctgagctggctgatttcacggttaaagcgcacaacgtcaggcggcgtgcctgacaaatcccctgccgcaagctggttaatctggataatcagacggcgtagcggggatatcacccacttcgccattccgaaccagacggctatggcaatggccagtagcaccagcggcgcaaacaggaacagccgttgcagacctgagagttgttccatgagcgactgacgcccctgtatcgtctgcttctcactccgttgctgatagcgtgcgaaattgtcattaaaatcggtctgaaacgcctgggcgggtacggcgaaaaagagctcgatgctgttggttttcaccagcccctccgcctgctctcggatggcgtcgaaaaacagctgatagctgttaaccaacccctcgtctttcggcggattaagcgcgagccaggcctgccatgcctgctgtgacgccgccagggatttttgcgcctcgtccatcaggctatgccagcttccttccgagccggtctctttatcctgcataaagtacacgccggagcggttgagcagatcgctggccgccagcagagaaatacgggcctgatccagcctgctctgctgctgccaggccagctgattgcgctgttcgttacgctgggcttcattcagggaggcggtgagcaggaaggaggaagagagttgcagggcggagaaaaggccaatgatacaaaagatgccggtcaacaggccaaactgacgaggaataaagcgcggcgcaagacggcgaaaaatttgcgttaggttcataattttcttctgtaacaatacgttagacgcgagcgagtctacgaaacgaaaatgacagaaccattacgcaaaaatgacaggaaacgtgaattgccgggtagcggcctggccttacccggcaacaagactagacgcgatccttccacaccgtctgcacattacagaactcatgcaggccgaaatgagaaagctctcgcccgaagccgctcttcttcaccccgccaaacgcgacgcgcgcatcgctggcgctgtagccgttgataaagatcccgccgcactccagctcgcgcgcaaaggtttcagccagcgcatcgttctcggtaaagaccgtcgccgataagccaaaatcgctgtcgttagccagctgcaatgcgtgcgccgcatcgttcgcaatggtaattgccgccaccggaccaaacagctcctgacgaaaggccgtcatctgtggggtgacgccgccgagtacggttggggcataatagttaccggtcccggacatcttctctccgcccagcagcagggtcgccccttccgccagcgtagcctgcacctgctgatgcagttcatcgcgaagatcaaatcgcgccatcgggccaatatagttatcttcctcatccggtgcgcccatcttcagcgccttgaccgcgtcaacaaagcgttgggtaaaggcgtccgccacgcccgcttccacaataaagcgttttgccgccgcacaaacctgcccggtattctgataacgtccggccaccgccgcgttgacggccagatccagatcggcatcgttcagaacgataaacggatcggaaccgcccagctccagcacgcatttcttcagcgccgcgcccgcctgcgcgccaattgccgcaccagcccgaacgctgccggttacggtcaccgccgcgatacgacgatcgttaatcgcctggctgacgccgtcattcgtcgcgttcacccagccaaagaccccctccgggaaaccggcatccgcgaataccttcccgatcagctccgccgagccgagcacattaggcgcatgtttaagcagatagctgttccctgccagcaggatcggcaccgcaccgcgcagcacctgccagagcgggaagttccacggcatcaccgccagaacgggcccaagcggacggtactcaatcaccgcattttcgacctgggtagattccgggtgcagcatcgccgggccgtgttcagcgtaccagtcgcaaaggctggcggacttagccacctccgcacgcgcctgcataatgggcttgcccatctcccgggagatagtctgcgccatctcttccgcacgactacgcagcgccgcacccagatcgcgaagtttttgcgcccggtgcgccacgctttcgcgtcgccactgacgaaaaccggtatccgcctgcgcaatggcacgctcaacgtcatgggacgttgcccacgggtaagcagccagcatttcgccggtagccgggttgacagagtgggcatgggtagcagatgaataggtcatgatgttctccacgtaataacagttgattgattgtggcctactctgctatttcttaaaaatgaataatactcaccaccttattcacgaatcgagaacggtatggacttaactcagcttgagatgtttaacgccgtcgcactgaccggcagcattacccaggcggcgcagaaggtacaccgggtgccgtcaaacctcaccacccgcatccgacagctagaagcggatctcggcgtggaactgtttattcgcgagaatcagcgcctgcggctttcccccgccgggcacaattttttgcgctacagcaagcagatcctggcgctggttgacgaagcgcgaatggtcgtcgccggggatgaaccgcagggattattctcgctcggcgcgctggaaagtaccgccgccgtgcgcattccggaaagtctggcgcggtttaaccagcgctatccgcgcattcagtttgcgttgtccaccggaccttccggtacgatgattgacggcgtgcttgaggggacgctcagcgccgcctttgtcgacgggccgctctcgcacccggaactggaagggatgccggtttaccgggaagagatgatgctggtcacccctgcgggtcacgcagaagtatcaaaagccacgcaggtgagcggcagcgaggtgtatgcctttcgcgccaactgttcttaccggcgtcatctggagagctggttccatgccgaccgcgtcacgccgggaaggatccatgagatggagtcctatcacgggatgctcgcctgcgtgattgccggggcaggcattgcgctgatgccccgctccatgctggagagcatgccggggcatcatcaggtggcggcgtggccgctggcggaaaactggcgctggctcaccacctggctggtgtggcgacgcggggcgatgactcgccagcttgaggcgtttatagggctgctaaacgaacgtcagccaccagcgtcttctccataaacaggctcagcggatcctcgttgtagggggcaaacgcgacgcgccgttcgtatccacactgttgatacagacgaatggcggcgtgttgtttgatccccgtctccagccggacggtgtagcagcagcagctgagggcttcatcttccagcgccgccagtaatttatcacccagccgttgcccgcgatgggttgggtcaatatagacccgtttcatttccccggtcccgtccccgttcaaaacgacagcgccacacccgacggcgttaagctgagtgtcacgaataatcatcaggatcagcgagtcgtccggcagttcggttaaatccagcagatgattactttccgcgggatagagaacgctttgataacggtccagcgccgtaatcagggcgagaatatctggatgatgggcggattcagcggtaatagaatacatggcaggctccttgtcgttttcgttcaacataccgcccgccctgtattccggcgtcatagtttttaatgatgaccgtaatcctggagtcgaaggaagattttccccttcatatacagtgtggcctgcccgccaatcagcacgcggtcgcctttcagctcgcagcgcagatccccgccgcgcaaggagacctggcgggccgacatctgcgtttttccgagcttttcgctccagtacgggatcagcatgctgtgagctgatcccgtcaccggatcctccggcaccccttcccccgggcagaagaagcggctgacgaaatcatactcatcccccggcgccgtaacgcagaccattttccccagcgggagcatggccgcgatatccggcgtcagcgcctccacctgccgctggctgtcgagcactaccaggtaatcacgccccacacgcacctcttttgccgcgttaatgcccagcgcgctgaacagcaccgctggtggagtatcgaccacctcggttgaccacgccgggaaattaagcgtcagccagtcgccgctgcgttgtaccgtcagttcgccgacaaagcgcgtggtgaaggtgatttccgtatgcggataatccaggtattcgaaaataacgtgagaagccgcgagggttgcgtggccgcagaggttaatttcatcctgcgtggtaaaccagcgcagttcaaacccgttatccgttcggacaaagaacgccgtctctgactgattatgctgcttcgccatattcagcagcgtctcatccggcagccacgcttccaacggacacaccgccgccgcattgccgccgaacgccctgtcgctgaacgcatctaccagataaaaatcaatctcctgcatcgtgttaccgcctgtttttgttgtgttgttctttatcttcaatgaaaacaaccccgttcgctaccgctgcatgaaggtaaattttgtgattcacatcacataacggttgagttttcgccgtttaaggctttaagatcgtctcctcatctttcaggcaacgaatcccagatatccctatgacaacacacacggtttcccgcagggtcgcgtggctacgcgtggtcacgctcgccatcgcagcgtttattttcaacaccacggaatttgttccggttgggctgctgtccgacatcgccgccagcttccatatggaaacggcacaggttggcattatgctgaccatctatgcatgggtggtggcgctgatgtcgctgccgtttatgctgctgaccagccagatggaacgccgtaagctgctgattgggctgtttgtggtgttcattgccagccatgtgctgtcatttatggcatggaactttaccgtgctggtcatcagccgcgttggcatcgcgtttgcccatgccgttttctggtcgatcaccgcgtccctcgccattcgtctggctccggcgggaaaacgcgcccaggcgctgagcctgattgccaccggtacggcgctggcgatggtgttaggcctgccgatcgggcgcattgtgggacaatacttcggctggcgcaccaccttctttgccatcggcatgggggcgctgatcacccaggtgtgtctgatcaaactgctgccaaaactgcccagcgaacactccggctcgctgaaaagtctgccgctgctgatgcgtcgaccggcgctgatgagcatctatctgctgaccgtgattgtggtgaccgcccattacacggcctacagctatattgagccgtttgttcaggttgtggcgggctttagcgctaactttgccaccgttctgctgctgatcctgggcggcgcggggattatcggcagcatcctgttcgggaagctgggcaataagcacgcgtctgcgctggtaagcagtgcgattggtctgctgctggcatgcctgctgttactgatgcctgcggcaggcagcgagagtcatctggcgatcctcagtctgttctggggcgtggcaatcatgattattggtctgggaatgcaggtcaaagtgctggcgctggccccggacgccacggacgtagcgatgtcgctcttctccgggattttaatctggggattggagccggtgcgctggtgggaaatcagatcagcctgcatgtatcgatgtcggccattggttatctcggggcgattccggcgctgatcgcgctgatctggtcggtgcttatcttccgtaaatggccggtcgcgatggaagaacagtccagccacggttgacgtttgttatgccgggtggcggcttcgccttacccggcctacgaagcattaatatccgtgttcttcatcaccgccaagataacggaatctttcatctgtcattttggtctgacaatcatagataccgattctcgttgccagaggagtggttgcagaagacgcatcgcttattttgccgcattttttagctttttcattgatccacatgttctgctcctttttcatcgaagctttgacggaatcaggaagatacttccatagttcgtttaactggcgatcgctatcagaataattacgcgcggcaatatttaatttattattgagttcagccttttgaagttcatctttattcatggcgagggtagccatcgccgctattgattcagagatataatctttattattgtattcatatgaaactgaaatatctttcccattatccgccatcgataacgagtaggtaaacttgtcccattgaacgctattgttaagcacctttccaccatcgttaattatacgtctcagtctgtcagggtaggatgcaatgtaacccatgatttcagaaggcacagtgagcgtgacagtcgcgctacagctccgcgcctgcgcttcgtcatcagacgattttgttgtgacattcgccattacaattgcgatttcattagcttttgcaatgtagtccttgagcggtttaccatagaaatccgaggggttagcgagataagccacctgtaacttactgactgcatcatctcttatttttgactgagcagcagagatggcatcatcgcgaccgcatttgaaatctggcgtagaatcaaacaacccagcataggcatttaatgaaaaaagcagtgtgctcactgcgataaatgaatattttgctcgcatgtctataacccgaaaagaaatgatgctgaacgttactttaagcggtaatacacagcaaggcagtggattatattaatgcagaaaaaattcgattttcagaatgtatttatattcataagaattatatccattgcgagtaggccgggtaaggcgaagccgccacccggcaacgttctcaatgatacgtcttaacaatctccagcacgccgttaataataaactggacgcccatacagaccagcaggaagcccatcagacgggagatagcctcaatccccccttaccacccnnnnnnnnnnnnnnnnnnnnnnnnnnnnnnnnnnnnnnnnnnnnnnnnnnnnnnnnnnnnnnnnnnnnnnnnnnnnnnnnnnnnnnnnnnnnnnnnnnnnnnnnnnnnnnnnnnnnnnnnnnnnnnnnnnnnnnnnnnnnnnnnnnnnnnnnnnnnnnnnnnnnnnnnnnnnnnnnnnnnnnnnnnnnnnnnnnnnnnnnnnnnnnnnnnnnnnnnnnnnnnnnnnnnnnnnnnnnnnnnnnnnnnnnnnnnnnnnnnnnnnnnnnnnnnnnnnnnnnnnnnnnnnnnnnnnnnnnnnnnnnnnnnnnnnnnnnnnnnnnnnnnnnnnnnnnnnnnnnnnnnnnnnnnnnnnnnnnnnnnnnnnnnnnnnnnnnnnnnnnnnnnnnnnnnnnnnnnnnnnnnnnnnnnnnnnnnnnnnnnnnnnnnnnnnnnnnnnnnnnnnnnnnnnnnnnnnnnnnnnnnnnnnnnnnnnnnnnnnnnnnnnnnnnnnnnnnnnnnnnnnnnnnnnnnnnnnnnnnnnnnnnnnnnnnnnnnnnnnnnnnnnnnnnnnnnnnnnnnnnnnnnnnnnnnnnnnnnnnnnnnnnnnnnnnnnnnnnnnnnnnnnnnnnnnnnnnnnnctgcgcaatgacccccagacgataatagcgataagcgacaaaaatgatcggcggcgcaacggtgataacccagtgcgggaatgtcgtcccatcacgcaccgttgaggcggaactgatgatcatcgcaatcgtccccggccccgccgtgctcggcatggctaacggcacaaacgcgatgttggcgctcggttcgctttcaagctcctccgatttgcttttggcttccggggattcgtgcgctttgtgcgccgggaacagcatccggaaaccaataaaggccacaatcagcccgccagcaatacgcagaccgggaatcgaaataccaaaggtattcatcaccagttgcccggcgtaataagccaccatcattatggcaaagacatagacagaggccatcatcgactgctgattgcgctctgcgctgttcatgttccccgccagccccagaaaaagcgccaccgtcgttaacgggttcgccagcggcagcaacaccaccagtccaagccccactgctttaatcaaatccaacataatgcaccgcagtccttatccttattcaacatcgcaattataggggcaaatcctcgtccggagccatccgacagcgtaaccataattgtctcgcgtaattcataaccccagattatctgtatgatttaaaagcgtacagaataagttcctgaagcgttttagcatttcgtggcatcggccgattcattcagttgacttatacttgcctgagcaataatatctgccgtgactaaactacttgccagggcaaccattgtgaaaagcaccagtgacctctttaacgacataatcccactgggtcgtcttattcatatggttaaccagaaaaaagatcgcctgctcaatgactatctgtcaccgctggatatcaccgcaacacagttcaaagtgctgtgttccattcgctgcgaagtgtgtatcacgccggttgagctgaaaaaggtgctctctgtcgatctgggtgcgttaacccgcatgctggatcgtctcgtctgtaaaggatgggtagaacgaagccctaacccgaatgacaaacgtggcgtactggtgaaactgaccagcgatggcgcggccatgtgtgagcaatgtcatcaattagtaggacaaacactgcaccaggaactgacaaaaaacttaacggcagatgaagtggcaacgcttgagcttttactcaagaaaatcctgccgtaaacagaaaaagaggtatgacgatgtccagacgcaatactgacgctatcaccattcatagcattttggactggatcgaagataacctggaatctccactctctcttgagaaagtgtctgagcgttcaggttactcaaaatggcacctgcaacggatgtttaaaaaagagaccggccattcattaggacaatatattcgcagccgcaagctgacggagattgcccaaaaactgaaagaaagcaatgagccgatcctctatctggcggaacgctacggatttgaatcgcaacaaaccctgacgcgtacgttcaagaactactttgacgtgccgcctcataagtaccgtattaccagtatgccgggtgaatcccgttatctgtatccgctaaaacattgcagttaatcatcgcctgttaagacgtaaccgaggaaatcatgaaatttatcgcctccgccgccctcaccttgctggtgctggtttccggccagagcttcgcggagcaaacccccaatgcggggcagcaaaataatcgtgacaccatgattatgccgtccacgcaaaaccagtcgccctgggacttcaatcacatgggcgctggcagcgacaaatccgacgaattaggcgtgccgtattacaaccacgacctgtaattcgtttttgccccgctaatgcggggcttttttctgccttaaccccgcacccgcattgcccgacgcacccgcaagccaaagacgttgatatacagcccggccataatcagccctgcgccacacagttgcagcgcgctgagcgtttcatccagcaacagtgcggcgctggcaagcccgaccaccggtaccagcagcgataacggcgccacacgccaggtttcatagcgtccgagcagcgatccccagataccatagccaatgattgaggcgactaacgccaggtagatcagcgacaaaatcgtcgtcaggtcgatctccaccaggcttttcaacatcgcctgcggaccatccagaataaacgacgcggccataaacggcacgatggggatcaatgcgctccagaccaccagcgataagaccggcggacgcgtctcgtgctgcattatcagtttgttaaagatattgccgcacgcccagctcagccccgccgccagggtgagcataaagcccagcagcgcgacatgctgaccgttgaggctgccttcaatcagcaccagcacgccaaagaccgcaaggctaatgcccgccagctgcttgccctgcaagcgttcgccgaagacaaatgcgccgagaatgatggtaaagaacgcctgcacctgaagcaccagcgaagccaggcccgcaggcataccgaatttgatggcgcaaaaaagaaacgcaaactgaccaaagctgatggtaaggccgtnnnnnnnnnnnnnnnnnnnnnnnnnnnnnnnnnnnnnnnnnnnnnnnnnnnnnnnnnnnnnnnnnnnnnnnnnnnnnnnnnnnnnnnnnnnnnnnnnnnnnnnnnnnnnnnnnnnnnnnnnnnnnnnnnnnnnnnnnnnnnnnnnnnnnnnnnnnnnnnnnnnnnnnnnnnnnnnnnnnnnnnnnnnnnnnnnnnnnnnnnnnnnnnnnnnnnnnnnnnnnnnnnnnnnnnnnnnnnnnnnnnnncgcagccccgccagcatcagtggaggcatgttgtgcaaccccattttgatgaccacaaaattgagtccccacaccacgacaaccagcaacgctaacagcccgtctttccgcgtcattttccgcccctgaattattaaaattttgtaaacacttcaaggtaacagaaaaaatagccccgcgagaagatcattaattctggtactggagagaagcacctgcggataaattgggtgctatacaagctgccgatcccatgataatcctgtaataacaaaacaaaaaaagacataagcatttgtcgggcaggaaaatgaaaccatcaatcaggcgctcaaccgcagcgctgctggcatcgtcattgttattaacaattggccgcggggcaacgctgccctttatgaccatatatctcacacgcgtgtacgatatgagcgtggagaatattggctatgcccttaccgtggcgttgaccatcggcgtggtgtttagcctggggtttggcatcctggcggataagttcgacaaaaaacgctatatgctgatcgccatcgtggcctttatcgccgggtttgtggcgattccgctggtgaataacgtgacgctggtggtgctgttctttgccctgattaactgcgcctattccgtcttctcaacggtgctgaaagcatggtttgccgacgtgctgacctccagcgaaaaggcgcgcgttttctcactcaactacagtttcctgaacattggctggacgatcgggccgccgatcggcaccctgctggtgatgtacagcctgcaactgccgttctggctggccgccttctgcgccgcactgccgctcgggtttatccatttctttgtgcagaaaagcatagcctcagacagccctgaggagaaaatgccgtggcagccctcggtgctgctgaaagaccgggcgctgttctggtacacgctctccggcctgctggcgtcgtatgtgggtggatcgttcgccacctgcatttcccagtatgtcctcgccgcacatgcggacagtgatttcgcagaaaaggtggtggccgttgtgctgcccgtcaacgcggcggtggtcgtcaccctgcaatacgcgcttggacgtaagatcaccgccagcaatatccgtccgctaatgaccgccgcgacgctttttttcatcctcgggctgggcgggtttatgctttccggcgagaacctgatttactgggggatcgcggcggcgattttcaccctgggtgaaattatttatgcaccgggtgaatacatgctgatcgacaatatcgccccgccgggcatgaaggcgagctatttctccgcccaggcgctgggctggctcggcgcggcggcgaacccgatgatcaccgggctcatcctgacccatctgccgcactggtcattatttatcattatgatggccgccatcattgcggcctggctgatgatattgcgcgggatgcgcgtgaaaagtgaagatagcgtgtcgggtggcgctgcgcttacccgaccgacaaaaccctaatcgtaagccgggtaaggcgaagccgtcacccggcaaaaccaacaccctagtggtgcaacatctcctccaccacctgctctttgtacatctcattcgggtagtaggtcggccagttatccatctctttcagcagcgcctcgtgggaggtgttgcccataaagatatggaagtgtgaagaggctttcggcccgatgatatggtcgctgaactgcacaaacttaggcgcctggctcgcgttatccttgcattcaaacaggtagcgcacgccttttttccccgacgcataggtcagaattttgtagccgctgtagtcgtagcggcagctgctcaccgttttgcctcggtggaattccatcacgttgttttcaatgccgatggcgtccacgtccgtcgcgtaccccttgcggtagtaggccttcacctcggcagcggatttttctcccttctgcgctttcttttcgaaaaccggatccagcgaaccatcaagcaggaacggataaacggactgccaggtcccgtcccagtcagacagcttcctgtccctgacgtctttatcctcaaagacgccgtttgccgccttctgttccgcctctgtcatctgatgaccgtgcgaatgggcaaaaagcgagccgcttaccagcagcgttcccagagtcagcgcaatttttgcaagttgtgcagccacagcaaaatcctcattccgttttataagaatgaggatgttatattataacatttcagatcgcaaccagcccgcgaacgccctcctgctccatgttctccccgcgcccctgctggacgatgctgccgcgcgacatcaccagatagctgtcggccagctctgccgcaaaatcataaaactgctccaccagcaggatggccatatccccccggttcgccaggctgcggatcacctgcccaatctctttaatcaccgacggctgaataccttccgtgggttcatccagaatcagtaaccgtggacggctcgccagcgcgcgacctatcgccagctgctgctgctgaccaccggaaagatcgcctccgcgtcggtgcttcatctcctttagcaccgggaaaagctgccaaatctcctccggtacgctccttgcgtttcccgcggagaagcgtgacagccccatcagcaggttttcttctacggtcagacgcggaaaaatctcccgcccctgcggaacataggccacgccggactgcacccgctggtgcggtttactgtgagtgatgctctttccctgccagacgacctccccggctttcaccgggatcagccccatcaggcacctcagcagcgtggttttgcccaccccgttgcgccccagcaggcaggtaacttccccgacgaccgcctcaaagctcaccccgcgcagaatatgacttccgccgtagtactgattcagttcgctaacctgtaacatcacctctccttaacgtcccagatagacgtcaattacctgttcattggcctgtacctcgcgaagcgaaccttccgccagtacccgcccctgatgcagcaccgtgacgtggtcggcgatggtctcgacgaagcccatatcgtgctcaaccaccatcagcgaatgcttgcctgccagggtgcggaacagctcggcagtgtattccgtctctgcgtcagtcataccggcagcgggttcgtccagcagtaacaggtgcgggtcctgcaccagcagcatgccgatctccagaaactgcttctgtccgtgggaaagcagcccggcacggcgatcgcgctcgctgccaagccgcagcaaaaccagcatctcatcaatgcggtcgcgctgctcgccgctgagcgtggcccgcaggctcgcccagacggacctgtcggctttcatggcgatttcgaggttttcccctacggtcagcgcttcaaacacggtcggcttctggaacttacggccaatgccctgacgggcgatggccgccggttccagggcagtcagatcgatggactgatcgtaaatagctttcccgctttttggccgggttttgccggtaatcacgtccatcagcgtggttttaccggcgccattagggccaatgatgcagcgcaattctccgacgccgatgttcagcgagagatcggtcaacgcctgaaaaccgtcgaaactgacgttaatggcctcgagctgcaacaccggatcggtctgttcgcggtaacggtcgcccggtagctggcgggtaaagagtccttcagagggctgcattaattctctcccttacgaaacagaccgaacacgccgcgcggtaaaaacagcgtcacggcgatgaaaatcagccccagaaacagctgccagtactccggcatcgccacggtgaaaaagctcttcgcaccgttgaccagcgccgcgccaatcaccgggcccaccagagtgccgcgtccacccagcgctacccagatggccgcttcaatcgagttggtcggcgacatttcacccgggttgataatgcccacctgcggaacgtacagcgctcccgccaggccacacagcacggcggaaagcgtccagaccagcagcttgaaaccgcgcggatcgtagccgcagaacgtgagacggttttccgcatcgcgcaccgccgttaaaatgcggccaaatttactcttcgccagcgcgtagcctgtgcccagggccagaagcagcagcacgaccgttgcgagaaacagcgcgatccgcgtggtggtcgccgtgacggaaaacccgagcagcgtggtaaaaccggtaaagccgttattgccgccaaagccggtttcgttgcgaaagaacagcagcatgcccgcgtaggtcagcgcctgggtcatgatggagaaatagacccctttgatcttcgagcgaaaagcaaaccagccgaagaccagcgccagcaggccggggatcgtcacaattaacaccagagcccaggcaaaatgctgcgttccccaccagaaccagggcagctcgctccacgagagaaacgacataaacgcgggcagcccgtccccggccgcctggcgcatcaggtacatgcccatcgcatagccgcccagggcgaagaatatgccgtgccccagtgagagcataccggcatagccccagaccagatcgagggccacggcgacaactgcgtagcagaggatcttgccgatgagcgtcaacatccacgtagaaacggccagcggatgcgttgcgggcaacagcgcgagaaaaggcagcaccagcagcgccgcaaccagcagactgccgaagatttgcgtggagcgcggtgccctgcgcgccagtgttaaggtcaatggctggctcatcagtctgtcaccctccctttaagtgcgaataacccctgcggacgtttctgaataaacagaatgatcgccaccagaatcaggattttgcccagcacggcgcccatctgcggttcaagaattttattgaagatccccagaccaaaggccgccgcgacgctaccggccagctggccgacgccgccgagcaccaccaccaggaacgaatcaatgatgtatccctggcccagctccggtcccacgttccccagttgggacaatgccacgccgcccagcccggcaatgccggacccgaggccaaacgccagcatatctacccgtccggtggggacgccgcagcaggccgccatgctgcggttttgcgtcaccgcccgcacgttcagccccagacgcgttttattcagaatgagccaggtgaagaacagcaccatcagcacaaacccgagcaccacaatgcggttccacggtagcgtcaggttggcgaaaacctgcaccccgccggacagccaggccgggtttgcgacctcaaggttctgggcgccaaaggtcatgcgcaccagctggataagcatcaggctgatcccccaggtagcgagcagggtttccagcgggcggccatacagatggcggatcaccgtgcgctccagcaccatcccgatacctgccgtcaggcaaaacgccaccggcagcgccaccaccggataaagcgccagccactgaggcatccactgcgccatcacctgctgcaccatccaggtggcatacgccccgagcatcagcatttcgccgtgggccatgttaatcacccccagcagaccataggtgatagccagcccgagcgcggccagcaagagtaccgaccccaacgacaggcccatgaaggcctgccccagcagttcgccccacatcagccggtgctgaatacggtccaggctctcagcggcggcggcacgtacccgtgcgtccggctcggtttgcgcccgggtgaacggcgtcagcgtggcctgaacgtccggatcgtcagactgtcccaacagttcaaccgcgttgaggcgcgtttccgcctgcggactcgccagctgaagatttgccagcgccagcctcagcgactgtcgggtgacgtcatccgtttcgcggttagcccgctgttgcagaaacccgagcatatccggctgggcgtcacgctgaagttgccgcgcggcatgacgcctttcggtgacactgtcactgacaagctgatgcgtcgccagcgccgtgacggttaacacgcgcagccggttggtcagccgcacggctttggtcgttccttcggcgctctttgccgcgcccagggcaaccatttcgccgtcgatgcgggtaaaagccttcttctggctgtcggtgtagaggttctcctgttgcagcgctttaagcagcggcaaacgtgcaggttccggcgtggctgcccagcgggtcagcatggcggtctgctggctgcggctagcggcaacgaaatcatcggcatccgatgcctgcaccatccctggcagcagtccggtaagccacacaatcgcaataattatgcgcatggcgttcatgacgtctctccctggtggtggcttagttgctggcggttttcatcggctggtcaggttttttgtcattcccggcgataaacgggctccacggctgagcgcgtaccggctgttcggtttgccagacgacgttgaactggccgttgccttcgatttcaccaatcatgacgggcttatgcaggtggtggttggtggcatccatggtcagcgtaaagccggatggcgcgttgaacgactggcccgccattgccgcgcgcactttgtccacgtcggttgtccccgctttttcaaccgcctgcgcccacatatgcaggccgacataggtcgcttccatcggatcgttggtgacgacggtatcggcattcggcagcttatgggctttcgcgtaggctttgtaggccgcgacaaaagtctggttggtcgggttatcgacggattcaaagtagttccacgccgccaggttacccaccagcggtttggtatcaatgccgcgcagttcttcctcgcccaccgagaacgccaccaccggcacgtccgtggctttcagcccctggttcgccagctctttatagaaaggcacgttggaatcaccgttgatggtggagaccaccgccgttttaccccccgcagagaatttcttgatactggcgacgatggtctggtaatcgctatgaccaaacggggtgtagacctcttcaatatctttatcttccacgcctttcgagtgcaggaaggcgcgcaggatcttgttcgtggtacgcgggtaaacgtagtccgttcccagcaggaagaagcgtttcgcgctgccgccgtcctcgctcatcaggtactccaccgccgggatcgcctgctggttaggcgccgcaccggtataaaagacgtttggtgacatctcttcaccttcgtactgcaccggatagaacagcaaaccgttcagctcttcaaaaacgggcagaactgatttacgcgatacggaggtccagcagccaaacactacggcgaccttatcctggctcagaagctggcgggccttttcggcaaacagcggccagttggaggccgggtcaaccaccaccggctccagctttttcccgagcacgccgcctttggcgttaatttcatcgatggtcatcagggcgacatctttcaggggcgtttctgaaatggccatcgtgccggagagtgagtgcatgatcccgactttaatagtctctgcggcctggacgccaaaactgacgcccatggcgaccacggaggcggacaaggcgaacgcttttataaaggtacgacggtgcatattttcactcctgaaaaagaaagctgtgcgaagacgtccgttaccgcccggacgcagaaaaagtaacgtcagtttcaggagagcaaaaagggtgccaggttgcagaggcaggatttaaacgggttcgaagagaggatctacgggaaacgactcagaatggtacagcgctgcactgtaataatgcagcgctgtgaacgatgttaccagacgtcgctggcgatttgcgtcaccaggcgaactttatcccactgctgggcttcgctcaggctgttaccctcttccgtggaggcaaatccgcactgtgggctgaggcaaatctgctctttcgccacgtagcgcgcggcctcttccagacgcgctttcaccccttccgggttctccagttcaccgtgcttggtggtgattagccccagaaccacctgctgtttacccgggcgcacaaaacgcagtggcgcaaagtcgccgctacggtcgttgtcgtactccaggaagaacgcgtcgacgttcaccgtaccgaacagcacctccgccaccggctcatagccgccttcggaaatccaggttgagcggaagttgccgcggcagacgtgtagcccgatggtcagatcgtccggtttgccctccagcgccttattcagcacccgggcataggttcgggcaagttcgtctgcatcatcaccgcgctcgcggatctgccggcgctggtcttctgaacaaaggtaggcccagacggtatcatccagttgcagatagcggcagcctgcatcgtaaaaggcccgaatggcatcgcgccaggtggtcgccagatcgtcaaagtaatctttcagatccgggtataccgtggcatcaatatccttgcggccaccgcggaagtgcagcacgctcgggctcggaatggtcatcttcggctgtgcgttaccgctgatgcttttgaggtagcggaaatcttccagcataggatgatcgccgaagcccagtttgcccgttacgcgcacgccatgggctttggtctgcaccccgttgaactgaatgccctgctgcgaatcataacgctctacgccctgtagcccgtcaaagaagtcaaagtgccaccaggcgcggcggaattcaccgtccgttaccacatgcagaccgcaggcgcactgctgctcgacaacatggcgaatggcctcgtcctcaaccgcgcgaagctgaccggcatcgatctcaccgctggcaaattgcagacgggcctgtttaacagaatccgggcgtaaaaaactgccgactacatcggcgcggtacggggcatggtgtcgctgcatggaaatctcctctgtctgtcggcgttaattgcccacagtgataattcatctcttgaatatttagacttctggatgtctaaacgtcctgaaaagatgtcataccggctctccgccgacaaacgagaaaatttcatctgtgttgaaataaattcatgttcacagggcgggtgatgaagatcctgcaaacgcgaaccgctcatcttcccagccggtcatgcctccgagcataaccttgaccggcagacccagacgcgccagcttcagcgccgccctgtccgccccgttgcagtgcgggcctgcacaatagacgacaaacagcgtgccctctggccacgctttcatccgctcggcggtgatctggctccagggtaaatgcagcgcgccgggcagatgccgccgggcaaaatgttcaggttttccgacaacgtgcagcagaacaaagtcctgctcaccgctggataccgcgtgatggacatcggcgcagtccgtctcgacgctcagacgacgcagaaaatgccccacggcttcctgcggctcagcagccggaaattcagtaacatagctcatgaatcttcctcatttgtggtgtttgtgttaacactactctatcccttacttcagcccatgaatgcgtccgcctatgccagaaaacagcaaaaagatgacaaacttaagacatccctcgccgcgcgcggtcgtgctggcatatgacggtttatgtacctttgagtttggcgtggcggtagagatctttggcttgccgcgcccggagatgggcgaggactggtatcagttcgccgtggcgagcgtggatgacggcgagctccgggcaacgggcgggatccgtattctggccgatggcgatctgggtctgctggaaacggcggatctggttgtcgtacccggctggcgagggctggacgaacccgtacccgacgcgctctgtcaggcgctccgtgcggcgcatgcccggggttgtcagctactctcaatctgctctggcgttttcgttctggcagcctcaggcctgcttgacgggcggaaggcaaccacccactnnnnnnnnnnnnnnnnnnnnnnnnnnnnnnnnnnnnnnnnnnnnnnnnnnnnnnnnnnnnnnnnnnnnnnnnnnnnnnnnnnnnnnnnnnnnnnnnnnnnnnnnnnnnnnnnnnnnnnnnnnnnnnnnnnnnnnnnnnnnnnnnnnnnnnnnnnnnnnnnnnnnnnnnnnnnnnnnnnnnnnnnnnnnnnnnnnnnnnnnnnnnnnnnnnnnnnnnnnnnnnnnnnnnnnnnnnnnnnnnnnnnnnnnnnnnnnnnnnnnnnnnnnnnnnnnnnnnnnnnnnnnnnnnnnnnnnnnnnnnnngcacgctatcccgctatcaccgtggttgaggatgtgctgtaccaggacgaaggcgatattctcacttccgcaggcagcgccgcggggattgatctgtgcctgcacgtggtgcgccggaattacggtattgaagcggcaaactgcgtggcgtgtcggctggtgatcccgccccatcgggacggctcgcaaacccagcagcttagccgaccggtggctcagttgcgggagagccagcgcctgggccagctgtttgattatcttcaccagcatctggccgtttcccataccgtcgaatcgctggccctgcgggtgggtatgagtcagcgcacttttctgcgccgtttccaggacgcgaccggaacaacgctcgcgcgctggttattaactgcacgattgcagcgggcaaaagattacctcgaaaacagtcggctcagcatcgacaatattgcggaacaaaccggttttggacaaagcggcacgctgcgccaccatttccggcagcaatttgcgctttcgcccgcgcaatatcgcaaacaattttcacagccggtacgataaacgggcaaaaaaaaaccgccataatctggcggtaaatgcttgcatggatagatttgtattttggtatctacgctccggtattccataccgggatgtggatcatctgcaatctaccactgtgagcctcaacgaagcataaacgaatcgattaacccgctttggtattaatttgcagataacgcatcagcccctgctctgcactctggcgggcatcatcattaatcgcttcgagataaaacgcacgagagaccccatacggcgcctgctcggatgggtaaacggcgaactggaaggttttgcccctcgccttattggtacagcccagctcccagcgatcttcacttacctgggtgctattacattcgacacgtccgtaatcgctggttaaatacgatccgacacggctttttgctgactgaatatattctggttcttcatttgaatagatgctggccgcagcacccaccgcaaccactacgcccagaagtgatagcacgattatttttttcatttattcgatccaatccttagccagaaaaatcttattgtaaatgatttcccaataaatctagcttctctttgcataccagaaatgggagtttacaacggcgatattgcttttaagaatagtcttaagtgagttttattgcgaccacaatttttgacagtctattttctcaaatttaaacagtcgaataattactctatgaaattatccctacgatgaccgtagcgtattttcaggggataaaggatgttcagaaaagaattttcgctactgctggtgattagcgccctgttctcagggcagattatggcggagcacaaagggcatgaatttgtgtatgtgaaaaacgccgaccatcagcttcgtcatgaagctgacagcgacgagttacgcagcgcggctgaggagtctgcggaggggttgcgcgagcaccatgcctggcagaaatcgcgcaaaccggatacccactctgcgggttagctgcctttacgcttcggcagggtcttcatcaaatcgtcagggctgacggaggccacaatgcttcccggcggcggcattttgaagatgtgattcttcatcttgccgataacgtgcatttcacacggacggcagtcaaacttcagcgtcagcacttcatcgccattcaccagctgcatcggcgtcgctttccagcttttaatattgcctttcgcctgtttcggacaaaggttaaaggcaaaccgcaggcagtgtttggtgatcatcaccggcacatcgcccttctcttcatgcgcttcatacgcggcgtcaatcagctgcacgccgtgacgatggtaaaacgcacgcgctttgtggttgtaaacgttcgcgaggaacgagagatgcgtgtccgggtagaccggcgcaggcaccgtttcggccttacggctgccgcgcggatagtttgccagccgtgcttcatccagcatctctgccgtttcacggcggaactggttcagcaggctgttcggcacgaacagcgcgtccggcagattcacctcaatattgcgcgcgtaataaatggtctgccccagcttcgccacgccatccttgaggttgctaagcgctttctccgcattgttcgccacctcgaacaggccgtcgagcgtatgcgtcacgctgataccgtcttcgcaggtcatggtcaggatcagctgctcttcccagccccccagcgcgatatccaccgcaatgcggcgctcgctggaggtcttgagcaaggcctgctgccagttgtgatccaggttacggttaagcgccgcattaggacgggctttgtagagatcggcaggcatttcgttcggccagacgcgatagcgattttcgccggttttctccaccgtattggcgcggaaacccactacttcacgtttgatcatcacgttgagaccatcgccgttcgccagcggctctgtaacctgaacgtcaagatgatctttcgccactttcagcacttcacccaccggtaaaccgataaacttcggtgaatcgaacgcgccaatatcccctttacgggcattcacgaaatagtccgtgctgccgcggtggaaggtcttgtccgtcgacggaataaagaaatgctctgtacgaccggcggacgcgcgcgccaggtcaccgcgatcgtcgatgatggcatccagcatctgacgataatgggcggtgatatttttcacgtagctcatgtccttgtagcgcccttcaattttgaaggagcgtacaccggcatcgatcagcgcgccgaggttggccgtttgatcgttatctttcatcgacagcaggtgtttttcgaatgccaccacgcggccctgatcgtctttcagggtatacggcagacggcaggcctgagagcagtcgccccggttcgcgctgcgccccgtctgggcgtgagagatattacactgcccggaatacgccacacacagcgcaccgtggataaagaattcaatggtcgcgtcggtcgcctggtggatatcgcggatctggttcaggttcagctcgcgcgccagaacaatttgcgtaaacccgacgtccgaaagaaacttcgccttctcaacggtgcggatatcgcactgggtgctggcatgcagctcaatcggcgggatatccagttccagaacgcccatatcctgaacgatcagggcgtcaacgccggtctggtagagatcggtaataagacgctgcgcgggctcaagctcatcatcatgaagaatggtgttcagggtcacgaacaccttcgccccgaaacggtgggcgaacgggaccagctcggcaatgtcgcgcaggctgttgctggcgttatgacgggcaccgaagccagggccgccaatgtagacggcatctgctccgtgaagaatggcttcacgggcaatggcggcgtcgcgggccgggcttagcagttcaagatgatgggagtgcaggcgcatacttcgtcgttatccgttatggtcaaaatggcggctattgtagtcagaagtctgtgccagtgaaaccgttttgcgacgctttagcggggataatggatcagagagtgaaaatgcaccgtccgggcgctgctgttacggtacgcgtgcggtttatcgccggcaaaacgcacgccggaatcagcgtatagcgtgcgccagacaccgtcaatctgcatgtccagctcaccgcttatcactaccacgtgctcgatcaccccggcttcgtgcggcgtggactcactcagcgcgccgggcgacagggtgatggagaaatggtcgaacttaagctgttcatcccaggggaaaagcggtttcaccaccatcgcctgctgctgcggatcgaacaccgcctgcggttcgctttctggagtgataaacgccgaaaaaggtacgttcagcccggtggcgattttccacaaagtagagaccgtcgggctggactcattgcgttcgatttgcccaagcatcgctttcgacacgcccgtctcttccgccagtttcgacaggctccagccccgcgcctgacgcagcgctttcagtgtggttgccaggtgttgagtgatatccatagttcctcccgttgcggcaaagcataccacttgtacgctatagcgcacagtgataccttatcccggacgttataacgcacaacggagtatccatgcgatcgactgcctctctctttcctgccgtgctggccggttttgttgccgttctggtgggctatgccagctctgccgccattatctggcaggcggctgcggcggctggcgccagtacacagcaaattgccggatggatgaccgcgctagggctcgggatggggatcagcacgctggcattgtcgtggtggtataaagcccccgtgctgaccgcctggtcgactcccggcgcggcgctgctcgccaccagcctgcaaggcgtgacgctggcggaaaccatcggggtatttatattcgcgaatgcgctgattctgctgtgcggcgtcaccggcctgtttgcccggttgatgaaactaatcccgcactcgcttgccgccgctatgctggcgggcgtgctgttacagtttggcctgaaggcattcagcaatcttgagggacacatttttctttgcggcagtatgctggccgcctggctggtgaccaaagccgtagcgccccggtacgccattgtcgccacgctgctggtgggcgtgttcgtggcatgggccggaggtgacgttgtcacgaacaggatgacgttatcggtcatcatgccggaattcattgcccctgcgttcacctttaccagcctgctcagcatcggcttacccttcttcctggtgactatggcgtcgcagaatgcgcccggcttcgccaccatgcaggcatcgggctatccgctggcggtctcaccgctgatcgttgccaccggcgggctggcactgctgttgtcccccttcggcgtttattctatatgcatcgccgccatcactgccgccatctgccagagcccggacgcccactccggactgccagtaaacgctggcgtggccgcggcggcggcaggcgggttttatctgctggcgggggtgttcggcgggtcgatttccgggctgatggccgccctgccgctgagcggcatccagacgctggccgggctggccctgctcggcactatcagcgggagtttgtatcaggcactgaaccatggagcagaacgcgacgcggcgatcgttaccttcctgatgaccgccagcggcgtcacgctcctgggaattggctccgccttctgggggctggtgctgggagggatctgttacgccgtcttctcacgccttcgccgcgcgtagctgtgacggcgtaatgccggtcatgctgcgaaaacggttactgaaatggctggcggagttaaatccgcaggccagcgcgatgtcggtgagcggcgtggtcgtgtgctgcaccagcgctttggccttctccatgcggcgctgcatgacatactgatgcggcgccagccccatcgactggcggaacatccgcgcaaagtgatactcactgagtgcggcctggcccgccagttccgccagggttaagggttgtgcaaggttttcctcgataaaggccagcacgttgcgcagtacaaacggtgataacccgccggtcactaccggcagcttccactgtacgctggaatagtgctggaccaaatgcgtcagcaataaggtcgacgcggtgctcagggtgagctgattggcgttttgctgccagtcgcagccgagcaaaaactggcgataaagggcggtgattttcggatcgctgccgaagattttttcctccagcgtcagcgatagcggtcatttatcccagattttctcccccacgtcccgcaggtgttcatcggtgcagtagaggtgcacaaacgacaggtcgtcacgaatatcccacgtggattcgctctcttccggcatcagacaaaaacggtccggcccgccaccatttttccagccacccggcgttttttgatagctttcatagccatccgccacgtacaggctaagggtgtgatggttgcttttcaccgtgatcgtgtcgtgcttgttgtaccacgccgccagttgaatgccagtattgagcgcgacggtttcccgcagcactgcattttgttggcgtaacgtttcaaaggtgtcgtaaacgagagacatggccgtaaacaggtgattaatcagactgtcagtctaagaagtgttgcagcctgttaccagccattgtgcgagaaaaaagcgcaagaatttgcaagtccggcgcaagacgatgaaagccggcccccccttctttcgccacactgtcgtttttcgcggtatgagaagagagacaccatgaacgcattactctatgggctggtcgttgtgatctggggcacgacctggatcgccatttttttgcaacaggggccggttgcagcgccggtctccattttctggcgcttcgccgtggccagcgccacgatgatgatcgtcctggtcgcccttcgccgcctgcgcaggctggcgctgcgggatcatctctactgcatgcttcagggctgctgcgttttctgtttcaacttctggtgcttttacaccgccgccgcccatatcaataccggccttgagtcggtgattttctcgatggccgtgctgtataacgccatcaacagctttatcttcttcggccagcgcccacccgcacgcttctggacggcggcagcgctagggcttatcgggatcattacccttttctggaacgatctgctcgccagcggctggagcgcgtcgttgcttacgggcatcgggctttccgccctcggcacctacggcttctcgctggggaatatgatcagcatgnnnnnnnnnnnnnnnnnnnnnnnnnnnnnnnnnnnnnnnnnnnnnnnnnnnnnnnnnnnnnnnnnnnnnnnnnnnnnnnnnnnnnnnnnnnnnnnnnnnnnnnnnnnnnnnnnnnnnnnnnnnnnnnnnnnnnnnnnnnnnnnnnnnnnnnnnnnnnnnnnnnnnnnnnnnnnnnnnnnnnnnnnnnnnnnnnnnnnnnnnnnnnnnnnnnnnnnnnnnnnnnnnnnnnnnnnnnnnnnnnnnnnnnnnnnnnnnnnnnnnnnnnnnnnnnnnnnnnnnnnnnnnnnnnnnnnnnnnnnnnnnnnnnnnnnnnnnnnnnnnnnnnnnnnnnnnnnnnnnnnnnnnnnnnnnnnnnnnnnnnnnnnnnnnnnnnnnnnnnnnnnnnnnnnnnnnnnnnnnnnnnnnnnnnnnnnnnnnnnnnnnnnnnnnnccaacgcctgggcgatgctgtatggcaccgtcgtgatgggccttatcgcgctcttcaggggcgatagctttatgccggaatggacggtgagctatatgggggcgctgctctatcttgcgctgtttggctcggtgattgccttcggcgcctactttacgctggtaggccgcattggtcccggtaaagccgcgtacagcaccctgctgttcccgctggtggcgctgtcgatttcaacggtgtacgagggttacgtgtggcatctcaatgggatcgtcggcctgctgttgattctggggggaaatatggtgatgtttacgaagccggaaacctggttccgccgcctgcggacggcataaaaaaacggcctgcgaaaatgcaggccattttttattattttgttgtctgatggacatcaaacatggtggcatccgtcgccatatcatccacaacctgcttcagggtgccgaagcccattggcgtattctcgttcgccagctctttcccttcacccttacgaacaaccttaatcactggtttgttcgtggccgcatcgattaactcaccttcgaagaacagatgcgtatccatggtacgatggcccgttgccatctgcgtacccgcaaccagcagcgccacaggcaccacttcatagaactgcaaaccttctttgtctgagctcacacccgtgatggcgccgcggaagatcaggctatgtttgcccggcgtcgtcacgatcggcttacgctggccaatcgcggttttcagtttggtattggtataattcaacagctcatcaagcgttttttgcccaagctgagtggtcggttttggcgtcggataataggttatcggcgtccagataatgctgtcgtaattcgcctcattataggacgggtcaacccaacgcagggttggcttcccggttgcagatttcatctcctgcaagccggagtaatcttttaaaaagcctgaatattgatcgggggctgcgacttttgacgcacagccggaaagggccaacagaccagaaagcactgcaactttaaaaaaagtgtgagtacgcatgatggtattccatgttatctgcaagtatgcacttgaagttataacaaaaaaccgggcgatgtgttgtggcaaaaaatgacgaagacagcacaaatagcgaaaaaactgcccgaccgaaaccgggcagtgaaaaattactccttcaggtccacttgccagaacaggtgcttgccgaaaggatcgatttcatagcccgtgacctctttacggactggctcaaaaatcgtcgagtgggcaatcattaccgccggcatttgatcgtgcatcatctgctgcgcctgcttgtacagcgccacgcgtttttcgcgatcggttatcgatttagcttcggcaatcaggttatcaaacggcttatagcaccatttggccgagttcgacccgccgttggcggacgtacaggtaaacagcgggccgaagaagttatccggatcgcccgtcgccgttgtccagcccatcagtgcggcctgatgctccccgcccttcacgcgcttcaggtattcgccccattcgtaggtcacgattttggtctgcacgcccactttcgcccagtccgcctggatcatctccgccatacgcttcgcgttcgggttatacggccgctgcacgggcatggcccacagatcgatgcttacgccgttggcaaatcccgcctcctttagcagcgctttcgctttttctggatcgtaatcatagtctttcagctcgctgtcggcactccagacgccaggcggcagcaggtttttcgccgccgtgccggtgccgtggaacaccgcctcaatgatggcgggtttgttaatcgccatcgccagcgcctggcgcacttttacgttatccagcggcggcttttgcgtgttaaacgccaggaaaccggtattcagaccggccttgctcatcaggttgatgtctttgttagccttcatacgcggcaggtccgccggattcgggaacggcatcacctggcactcattcttctcgactttggcaaaacgcaccgaggcgtccggcgtgatggtgaacaccagacgatccagcttcgattttccctgccagtagtcagggaaagcggtgaagaggatgcgggaatccttctgatattgcgccagcttaaacggcccggtgccaatcggctgcatatcgaccttttctggcgtgcccgctttcagcatggcatcggcatactccgccgacagaatggaggcaaagtaccacgccagatcagcgacaaacggcgcttccggatgcgccagggtgaagcgcacggtgcgatcgtcaactttatcaatggcggtaatcagactgccgaactccagactttcgaagttggaataactgccgttggagacgttatggtagggatgattcacatccttctggcgcataaacgagaaaatcacgtcgtccgcgttgaagtcgcgcgtcggcgtgaacagcttattactgtggaatttcacccccttgcgcaggtggaaggtatagatcttgccatcgtcgcttacctcccagctttccgccaggctcggcaccagttcggtagtgcccggtttgaaatcgaccagacggttataaaccggtacggcgctggcgtccacgctggtccccgacgtatagagctgaggattgaaattttccggcgatccttcggagcaatacaccagcgtttttgccgcgacggtggaactgaccgtcagcgcagcaagcgccagcgttatcattgtgaatgtgcttttcatcatttattcctgtctttttaattcgacggctaattacttcttttgccatttcataaataacattaaagtgatggcgcaaacacatgaaaaataaatacagaaggaaacactatgggctcagaactctccagacaattaacccaacgctttttccgctatctcgccatcaccagccagagcgacccgaaagtcaaaaccctgccctccaccccgggccagcacgacatggcgcgggagctggcgaaggagctggaaacgctggggttagacgatattgtgatagatgagttcgccaccgttaccgccgtgaaaaaaggcaatgttcccggcgcgccgcggattggttttattacccatatcgacaccgtcgacgtcggtttatccccggatattcatccacaaatattaacgtttacgggggatgatctctgcctgaataaagagaaagatatttggctgcgcgtaaatgagcacccggaaattctggcttatcctgatgaggagattattttcagcgacggaaccagcgtattaggcgcagataataaagcggccgtcaccgtggtcatgacggtgctggaaaacctcaccgctgaacataagcatggcgatattgtggtggcgtttgtgcccgatgaagagattggcctgtgtggcgcgaaagcgctggatttgaagcgcttcgacgtcgattttgcctggaccatcgactgctgcgagctgggggagattgtttacgagaactttaacgcggcggcggctgaaattcgctttaccggcgtcacggctcacccgatgtccgccaaaggggtgctggtcaatccgctgctgatggcaacggatttcatcagccatttcgatcgccggcaaaccccggaatgcaccgaggggcgcgaaggttatatctggtttaacggcatccaggccgggcagaacgaagcgatactgaaagccaatattcgtgattttgacaaagatggtttcgccgcccgcaagcagcacattgccgatgtggcggcgcaaatagccgcgcagcatcccacggcaaacgtggaataccgcattgaggatacctacagcaatatcagcaatgcgattggcgaagaccgccgcgcgatcgacctgatgttcgaggcgatggagtcgctcggcatcaccccaaaaccgatccccatgcgcggtggcacggatggagcggccctgtcagccaaaggcctgctcaccccgaacttcttcaccggcgcccataacttccactcgaagtttgagtttttaccgctgtcgtcgttcgaggcctcctgtcgcactgccctgcaactctgtctgctggcggcgcgttaagcgggcttgcgtgcgagcatggtagcgaagcgcagcttgatacggttcccgttggcatcggtacggtggagttcccctacctcttcgttgtacttgatcagctcccagccttcgtagtagttgctcagttcaccggttttgaaggcaaacgggaagccgactgtgcacggataatcctccgtatccatggcagcaacgatcaggttatagccgcctggtctggtgcaacgctgcatattggcgataagaccagggatggtattcgcttcgaggaacatcaacacgacggtggaaagaataaagtcgtattcgccgtcaaaggtcaggttgttcagatccttaatcgccgtttccagattcgcgatcccttccgccgccttaatgcgctcgatgttatcgatgctcatcgggtttttatcccacgccgtcacgtcatagccgttagccgcgaggtagaggctgttgcggccatttccgcaacccagatcgagcgttttaccgggcttaacaatgtccgcgctgagcagcacctctgagtgcgtgcgggtcagcccatatttctcagtaaagtagttttcatcgacagtcattatttttcctcagattgcataagcagtgccttatcagcgcgcaccagaagtttgccctgcatcagcaagataaaagtacggaccagcagcatcgcgatgatgacgttggtgaaaataaacaggggaaccgcgagggcatgaaagaaccctgacggactgctctgccccagatgtaaaccggtggtcgccagcgccgacaccccgaacgagaagctccagaacgacgcgttaaacggctgcgacagataccacggcatcagacgcagcataaacaggagttgcaacaggccatagccgaaaagcattttggcgaaggtgtccgcttcgccgccgttgacgctaaaccaggcgctacaggccaccagggcaggcgcaagctggatcccgagcgaggtacgaagggcagcgggcagttcgcccgcgctgcgcaggcgttgcaaaatgaccggctccaggctcagccaggaaaagaccccggcaccaaggaacaccagccccgcgtcgtggaagcctagcgcaccgcaggccatcgcgctgataaaattgttcgctaccgtcggcagatacagtcccggcgtcgtggcctcttccggatgcttgccgcgccacagcccggcgctttgccaggcggcatacgcaagctggatcaccacgcccacgctaaacaaccccagcgccagcgggcgataccacggcacaaagccgatggccaccagcagcgttgtggcaggaaacaggctgacaaaactgctcattaccggatgccgcatctcggccagcacgctatgtggaaaccgtaccgcacgggtaagaaacgccacgcctagaaggaaccagatcgccaccgccagcgccaccaggatctcgcccggccagcgcgtcaccggccagatggtgccggcgtaacgccaggcgaaccccatgcctatggtcccgaggaccataccgaaatacccggcgggcaagttaagaacgcgttggttttggttatgcattttttttaaagtttaaaatgtattttaaatgccattttaaggggtttcctgagcggacgccagcacttcgaaaaaccaaaactttgctacgtttattgaaaggcttttcagggataacacgatgacaaaatatcggcttagcaatgaaacgcgtctctggcgctggcaggacggatcaacgccgtgcacaacgcctctcagacaaattattgccgtgaaggattttaacgatgtgaccagcgggactaaaggcggttgggttgaggatgaacacgcgctcgcccaggacggggattgctgggtttacgatgaaaacagcgtggtatttgccggggccagaatatccggtaacgcccgcctcacccaaccctgcatcgtaagccaccgcgcacacgttggcggcaacggctggcttgacgcggcagaggtgagtcatggggcggcaataagtgacaacgtcaccattcagcactccaccgtacgcggggaatgccgtatcgcgggtgacgcgcgggtgctgcataacagcctggtgattgcagccaaagggctgacacccgaccgtgagcagatcctgcaaatctatgacagagccacggtcagccagtcgcgtattgtgcatcaggcgcaaatctacggcgatgccatggtgacctgggcctttgttgagcaccgcgccgaggtgttcgatcgcgccattattgagggcaacgcgctgaataacgtctgggtgtgcgactgcgccaaagtgtacggcaacgcccgtctgctggccggtctggaggatgatgccatcccgaccgtgcggtacagttcacaggtcgcggaaaacgccctcgtcgaaggcaactgcgtcattaaacaccacgtattaataggcggcgaggcgtggttacgcggcgggccgatcctgattgatgacaaagtggtcattcaggggcgggcgcgtatcagcggcgatgtcctgattgagcatcaggtggaaataacggacgatgcggttatcgaggcgctggagggtgaaagcattcacgtccggggagccaaagtgatcaacggcgacacgcggatcacccggacgccgctgctgggggcgctatagcgggaagattctggcgtacaggttcacgtcatcgtagcgaccgttgagcatttccgcttcccgcaaacaaccttccagcgtgaaaccgttgcgctgcgccacccggttactgctctggttatccacgcgacacttgatcacaaaacggcggatctcgccgcgctcaacgtaatagcgcataaacgcctggagcgcctgagaaagaataccctgcccctgatgcgcctcgtcaagccagtagccgatatacccggccttattcgcaggctcgatcgcgttgaaggagagcacgcccaccaattcgtcattcataaaaatnnnnnnnnnnnnnnnnnnnnnnnnnnnnnnnnnnnnnnnnnnnnnnnnnnnnnnnnnnnnnnnnnnnnnnnnnnnnnnnnnnnnnnnnnnnnnnnnnnnnnnnnnnnnnnnnnnnnnnnnnnnnnnnnnnnnnnnnnnnnnnnnnnnnnnnnnnnnnnnnnnnnnnnnnnnnnnnnnnnnnnnnnnnnnnnnnnnnnnnnnnnnnnnnnnnnnnnnnnnnnnnnnnnnnnnnnnnnnnnnnnnnnnnnnnnnnnnnnnnnnnnnnnnnnnnnnnnnnnnnnnnnnnnnnnnnnnnngtaaccgcgctggtgcaacatctggttgctctgcacgttgcggcgcgtgtcctcttcgctgccgacatgctgcgcccagtcaaaggcggtttgcagccaggttttgtttttgattacgaggttatgcagatcggtggtatagcgctcttcgacggcgcgaagctcgatttcctggttaacggggatgatttctgaagacatggtgcctcttaattgccgggtggcgctaacgcttacccggcctacaaatgcgtcaagagcaggccgggtcgccacccggcacagacccataaggactagcgcatgatccggtcgtcaacgtagttacgtttgtccggcgcgggcgggaagtactgatacagccaggtctcgctgatggcatcgccctgacagcgcaggaacaggcgcatatccaccggctcggtggagtcagaggttggataccagtcaaacagaatgcgatacccgtcgaacggttcgacatagagtatctccacctgcttcgcttcaccgctggacagggtgatcaccggctcaatgcccttcggtgcggcggccttcagatcgcccccgacgaaatcaatggcaaagcgacgggcccacactttcgggtaattttcacccggcgcccagccctccgggaagcctcccataccggtacgggtggcgtagacgtttgccagcggggaacgcaccggcggctgcgcgctccagtagagacggtatttgaagtccagctcatcacccgcctgcaccggtttctctggctgccagaagcagaccacgttatcgagcgtctcgccggttgtcgggatctccatcagggcaatggaacctttcccccagttgttgcgcggctcgacccacaggcttggtcgcttgttataccagcccatgacgtcctggtaatgagagaagtcacggtcaagctgcaacaaaccaaagcccttcgggtttttatccaggtaggcgttaaattgcagcttttgcgggttgttcagcggccggcagatccactccccgttaccgcgccacatcgccaggcggtctgaatcgtggatctgcggatgaatggtgtcgcacatgcggcgttcgttgttgccgcagctaaacatgctggtcattggcgagatgccgagctgcttgatgtctttgcgcgcatagagatggttttcaacgtccatgatcacctggctcttctcacagtggatcacaaacttataggcaccggtaatgctcgggctgtccagcagcgcatagacggtaaaggtggtatcacccggcttcacggtttcaaaccagaaggaggtgaaatccgggaactcttccggggtgtcggtaaaggtatccaccgccagaccacgcgcagagaggccgtactggtaggtatcatccaccgcgcggaagtagctcgcgcccaggaacgaaacgatatcgcgtcgcgccagctccggcgctttaaagacgcggaatccggcgaagccgaggtcgctctgcccttcaagctggcgggtatccacgcccgtatcgccgtagctgaacagctcaggccggaagtggatctcacgcgcctgagaggtggtttgatccagcgagaacatgcgcacgcggcggcggaaccccatccccatatggaagaactgggcgtccagctgacggccttcaatgttgttccacaacgactgcttctcatcgtaacggatggcgttgtacgcctgcggcgtcatggtggccagcgtttccggcagtggacgcggcgcaccgccccacggggttttcgccagatcgtgcgccatggattgcagaacagagaagtcaaagcgacggctctgaccgtcggcaatgtcggagtcagcagcatacgccgcctgggaaaacagagaagcaaggccagaagtgccgctcagggcagccattgccagggaacctttgagaaaacgtctgcgattcatgcctgagaaaacgtccttatggtcgtgtgaatgagtttcgcgcgcagcgaaatgacggcaagaaagaacgcacagcctaaacaaaaacggttaagaatccaattgttggcgggtgattatctgaacaaaccgagaaatattttctgtcgaccagaacggcctgaaaaaggggtaaagttatgtataaaagtgtcccggctggacatcaacagccgggaccaacgaggcggttattttacgctgacatcgatacccgggaagtacttatcagccagtttagcgatcgtgccatcggcacgtactttatcaattgcggcatcaagctgctttttggtggcctcatcccccttacgcagcccaaagccgatcccactgccgaggatggtgtcgtccgacaccggtttgccgataaagccaaaccctttaccctgcggcttactgaggaaacctgcctgcccggccgctgacatgaccagcgaggcatcgatgcggccattcagcagatctccccaggccatattctgatctttataagacaccacggtgacaccgtgcttttcccagtgctctttggcgtaagtttcctgaattgaaccctgaagaacgccgatggttttgcccttcagcccttcgggggtagcctctaccgcagaaccggctttgcccaccagctgggagggaatgcgatagatgggctgggtgaaatcaatgcttttgcgacgctgttcggtgatgttcatcgccgagtttatggcgtcgaactttttcgccaccagaccggggatcaacgcatcaaacgaggtttcaacccagctgcacttcagcgcggcggctttacagatggcatttcccagctctatgtcaaacccttccagctcccctgacgcattgcggctttcaaacggcggatattccgcttccagcccgtatcgcaactcggtagcggcaaacgacgagaatgaacacaacagtcccatgccgacaactaacgcgcgtaatttcatctcaaattccttaacgtggtgtaacccgacaaagggcctgggcacctgcccgtaacgtcgcctcatctttcgcaaaagagagacggattaacttattgtccgtgccatcggcataaaacgccgacagcggaatggtggcaaccccgcattcgacaatcagccttttcaccatctcgctgtcgcgctcgtcgctaaagccgctgtaatccgccagcaggaagaacgaaccggcacttggtagcagcctgaacggtgagtcggcgagcaaactttgcagcagatcgcgcttgcgctgataaaacgccgccagcgacagccaggtttgcggatcggtcatgtgttcggcaaacgcgtactgcatcggcgtatcggccgagaacattaaaaattgatggactttacatatctcatccatcagctccgcgggtgccacacaataacccacgcgccagccggtgacgtgataggtttttccgaaagaagaaataatcacgctgcgctccgccagctgcgggtgcgtcgccattccgtggtgcggttcgccatcaaaaacgacgtgctcgtacacttcgtcagacaaaatgatgatgtcggtgtggcgcgtcagcgctgccagttggtgcagatcggcggctgaaaacacctgtccgctcgggttgtgcggcgtattgacgatgatcatccgcgtgcgcggggtaatagccgcccgtacttcatcccagttcacggcaaaatccggtaccgtcagcttaatggcaatcggcgtcgccccttgcagacgcacaatcggcgcatagctgtcaaaggagggctcgaaatagatcacctcatccccaggatgaaccaggccgctgatggctgagtaaagcccttcgctggcgctggcggtcaccagtacctcactcgccgggtcatagcgcgtgccatagagcgtggtaattttgtctgcgatgcgctccctgagcggttgcagcccggtcatggaggcgtactggttatgccctgcctccatggcgcgggtcacgccggtgataagtttcgggtcgcaggaaaaattcggcgcaccctgagaaaggttgatggcgttatgccgggctgaaagctggccgataacggtaaaaatggtggttcccacatcgggcaatttggatcgtgtctgcaccggcgttttcaaagtcatcctctgtcccttctcgtggtgaatgcataactattcaaacaacaacttcattgccgggacaatcgaattgttgtcataatagccatgacaaaaacgcatagctaaggtgagatatgtcgcgtcgttcatttccgctcaatgccgtagagacgttcatcgtgaccgcgcgtcacctgaatctaacccatgccgccagggagctttgtctgacgcagggggcggtaagccgcaaaatcgcttcgctggaaagctggttcggcttcccgctgttcgagcgccatgcgcgcggcctgcgtctctcctctcagggaagcgccctgctgccggagctgcaatctgcgtttgagcacctgctgaacgttgctgaacaggcacgaacgcaccagaccgttattcgtctgaaagcgcctacctgcgcgatgcgctggctggtgccgcggctgctacaggtggagcgcgaacagccggaactccagattgcgctgaccaccaccaccgatcataacgtcaatttcaaaaccgaatcctgtgacgcggcgattgtgtttgggacacacatgagcgccggcgatctgctgttcgaagaggccttaaccccggtgatgagcccggtacgggccggttctgcgctggaaactctcaccttccttcaccccacgcgggacaaaacggactggacgctgtggctggcgaaacagccgggtccgccgccagctatgctcaaaaatcaacacttcgaaaccatggatctggccattaccgccgccattcaggggctgggcatcgccatcgcggatgaaacgctggtggaggaggacgtgcgcgccggacggctgatgcggccttttgacacaagcataaagacgggggcgagctaccggctggtattacgcgacgcacccggcccggaaaacggactggatgcgtttcgcgcctgtctgctcagtcgaggctgacgtggtgtttcatcacccgtttaaagaggctcatacgggcacgcatgaagcggttttcaagccgaaaacctgcatgtttattcacaccgatacgtaacagcacgtctcgccctttccggcaggcgggccagcgcgtgggccctgtcaggctatcgcgtgcccccgcatcccgggcgaagctcacccagtagtccgccacctgagcggcgaaggccagatcgcgttcatttacatactgccgcgagggttccacctgtccaagggtatcgaacacgtagggcacttcgttgccgtgccaggcgccgttgatgtacgtcgcgtgctccgcttcggccacataatcaaaccagtatcgccagcacaggccgcccgcccgctgctgggcctgcatcactacgtatcccatggtggtgaaggccatgtcgcggcatacctgcctgccaagttcctcatcgcccttcacgccaggataaagcagcttaatcagccccaggccaaagcgccgttcacggcgaagcttctggatctgcccggcaagatcgaccccgaataccgacatcacgctggcttcgtcgctgtttgacccaatcatcaccggtacaggatgctgacgagccgcgaaaaagacgtcgagcatggcctcaggcaaaacgcagtcgcccacgatgggcgcaggagcgatattcagcggtgaggtcagcggccagaacgcctcaggcgggatcgcgcgaagctgttccgcggtggcattgtgcaggccgaaatgggcggcaatcgcttcgcctttatgcatggcctgctcgcgcggggtgtcgggcagcgtgtacccgctttgcacaatggctttatggaacagtcctcccgcaagcggggaagccatcaacgagagcacactgcgcgcaccggccgactcgccaaagacggtgatgttctcaggatcgccgccgaatgcggcgatgttatcgcgcacccattccagggccttgatctgatcgagcagcgcaaagttatgcaccacgcgctcttcttccccctccagcgccggatgggcaaaaaagccgaggtgtccgagacggtaattgatcgtcaccaccaccgtgccgcgcttcgccagcgccctgccgttatacggaggcagcccgccagcgccgagggtaaatcctccgccgtgcagccagaccatcaccggaagcggatcggcgcgtgcgactggcgaccagacgttaaggtaaaggcagtcttcagagaactggccgggatcgccgccgcccagctcctgacagctttcgctgctctgccagctggaggcggagaacgccgtcgccggacgtacgccgtcccagcgcgcggggggacgcggggagcgccagcgccacgggccaacagggggtgccgcatagggaatgccgcaccacacgtgggtatcgccttcagtaaaaccaatcagtgcgccctggcgcgtttcaaccacaggggcggagggattttccataccaaccttctttttccatcacacccttgcagagtaacggtttcagagcaaaccgcaacgctgtttgctgcgcgcttccgcctcctcgtaaagcgaaaactcgtcgtacaccgcacagccgagcgcggcttcgaaggcattgcggctggcattgccgtggctgcgcgcctgcgtttcattgccgagattcgactggaagatccccgctgcgctgacgggcagaaaatcctcgtaggtgatgggctgtgccacaacccagccgcgttcgatcagcggctgcggatcgtcgccgggacgaaacgcgtggcgatgcgcctcacctgtcggggtcagacggtagcggaaataggccagcccctgacggcgcaggaacatttcgctgtccgggaaggcgctgaagatctcgcgcaggtgaagctggtgggtcaggttgtctttgccggtcccggcctggtttaacaggctgtcgtacagctcgcgtcctttcggcgtaagggccacgccgcgctgctcaatctcaccgaaacgcgcggtatgggtgcccttgtgttctcctgcgaaaagcaccggctcctccagcgccttaaagctggtctggcgcaggaggatcggcacctcgcggcgcggcgggccttcaatcagaattttcggctcaatgccgtacttcggcatcagctcctgcacccggtcgatatccagcgtgcgcggcgtgagatggttgatatggcaccccgggaaacagaccacgtcggcaatcaggcgatgttcgttgctcagcgccagataggtttcctgatcgaccgtcgcatggcgatgccagcggaaggtttccagggcttcctgcacaaattcgcgcgcctgtgcctcagtaaagtgtccctgcgcatcatgcaggtcgatcagttccaggcagcgcggcgtaaagatgttgcgccgggagaggatctccgccgccctttcgcgcagcgcaacgttttcaatcagctccaggcgcagcagcgaggtaaaaatgcgaaacggattacggcagagcgccgcatcgtctgtcggacgaaacgccgtcgagtggacgggcacgcccgcctgggagagatcgtaatagctgaccgggtacatgcccataatggcgaagatccggcgcagggtggaaagctcctgcgcggtgccaacgcggatcgcaccgtgacgttcaacattcaggcgcgccagttcgtctgcgtttgccagttgttcatgtaaaagtgggttattttccagaaccgccaggttaacgtccgccaccagttccagcaaggtgccgtactgcggaacttcctgctggtacatcgccgacatagcctgcgaaaagtgttcccgaatatcatcagccgtgatggtgttcgccatgatgtcatgcctccagtgaatactacctggagtgtagagaagcccgttcctttcgttgggaagaatttacgaattgtgatccaggcagaccagtggtcaaagcgtgggcattttcgaaaaacggttgtaactcaaatagatcaaatgttaaaaatattttgctatcaggttatcaaattcaaacatcttaacttgtcacccgcgtcgctctgtttttaacatcgcctatggaaaaaaatggtctgttcagtcagcgcatacgcttgcgccatttgcatacttttgtggccgtcgctcaacagggaacgctggggcgagcggctgaaacccttaacctcagtcagcctgcactatccaaaacgctgaacgaactggaacagcttaccggaacccgcctgttcgatcgcggccgtctgggcgctcagcttactctcgtgggtgaacagttcctgacgcatgccgttaaagttctcgatgccctcaataccgccggtcaggcgctcaaccgcaaagaggagtcggccagcgacatcgtgcgcgtgggcgcgctgccaacggcggcgctgggaatactgcctgcggcgatcggccagttccaccgtcagcaaaagcatgccacgcttcaggtcgcgaccatgaataacaccatgctgctggcgggcctgaagtcaggcgagctggatctgggcattgggcggatgtccgatccggaactgatgagcggcctgaattacgagctgctgttcctggaatcgctgaagctggtcgtgcgtccgaatcatcccctgttgcaggacaccgtgaccctgagccgcgtgatggagtggccggtggtggtctcaccaaaaggaaccgttccgcgtcagaatgcggaagcgttgctgcaaatgcagggctgcacgctgccttccgggtgtattgaaacgctctcggcgtcgctgtcgcgccagcttacggtggattacgactacgtgtggtttgtgccgtccggcgcggtgaaggacgatctgcgacgcggcgtgcttacggcgctgccggtaacatcgcccggcgcgggagaaccgattgggatcctgacgcgggtagatgccccgctctctgaaggcgcgcaaacgctgttaagcgccattcgtaaatcaatgcctctctgaccctaaatgcagaacccgccgcgaaggcgggtctgtcttactcagaacgtttcccagttatcacctgagacggccgccgccggggttaaaggcgcggatttcgctgcggttgcaggggctgtagtccgtccagcccctgccccgatgagacgaaacgcgccaacagcctccgtcagacgtgcgccctgctcttccagcgaggccgccgccgcagaagcttcttccaccagcgaggcattctgctgcgtcaccttgtccatctcggaaatcgcctggctcacctgaacaatgccgcggctctgctcatcggacgccgctgcaatctccagcataatatcggtgacgcgtttaaccgcctcgacgatctcattcatggtattgcccgccgcaaccacttccccggaaccctgatcgataagcgacacagattcattaatcaggctttcaatctctttcgccgcattcgcgctgcggcttgccagggtgcggacttcactcgccacgaccgcaaagccgcgtccctgttcacccgcacgcgccgcctcgaccgccgcgttgagcgccagaatattggtctggaacgcgatactgttaatcacggcggtaatttcagagatcttcttcgagctggtggaaatattacccatggttttcaccacgccggagaccatctgccccccgcggctggccttaccggaggcatcttctgccagtttactcgcatgatgcgcgttatcggcgttctgtttcaccgtcgcggtgagctgctccatgctggccgccgtctgttcaatcgccgccgcctgctgctcggtacgggaagagggatcggtgttacccgcggagatctcgctggttccacgatagatctcctccgccccttgccgcacggtgcccacggttgtcaccagcgcgtgctgcatcgtttgcagatcgcgcgtcaggcggccaatttcgctgcgtccggtcggnnnnnnnnnnnnnnnnnnnnnnnnnnnnnnnnnnnnnnnnnnnnnnnnnnnnnnnnnnnnnnnnnnnnnnnnnnnnnnnnnnnnnnnnnnnnnnnnnnnnnnnnnnnnnnnnnnnnnnnnnnnnnnnnnnnnnnnnnnnnnnnnnnnnnnnnnnnnnnnnnnnnnnnnnnnnnnnnnnnnnnnnnnnnnnnnnnnnnnnnnnnnnnnnnnnnnnnnnnnnnnnnnnnnnnnnnnnnnnnnnnnnnnnnnnnnnnnnnnnnnnnnnnnnnnnnnnnnnnnnnnnnnnnnnnnnnnnnnnnnnnnnnnnnnnnnnnnnnnnnnnnnnnnnnnnnnnnnnnnnnnnnnnnnnnnnnnnnnnnnnnnnnnnnnnnnnnnnnnnnnnnnnnnnnnnnnnnnnnnnnnnnnnnnnnnnnnnnnnnnnnnnnnnnnnnnnnnnnnnnnnnnnnnnnnnnnnnnnnnnnnnnnnnnnnnnnnnnnnnnnnnnnnnnnnnnnnnnnnnnnnnnnnnnnnnnnnnnnnnnnnnnnnnnnnnnnnnnnnnnnnnnnnnnnnnnnnnnnnnnnnnnnnnnnnnnnnnnnnnnnnnnnnnnnnnnnnnnnnnnnnnnnnnnnnnnnnnnnnnnnnnnnnnnnnnnnnnnnnnnnnnnnnnnnnnnnnnnnnnnnnnnnnnnnnnnnnnnnnnnnnnnnnnnnnnnnnnnnnnnnnnnnnnnnnnnnnnnnnnnnnnnnnnnnnnnnnnnnnnnnnnnnnnnnnnnnnnnnnnnnnnnnnnnnnnnnnnnnnnnnnnnnnnnnnnnnnnnnnnnnnnnnnnnnnnnnnnnnnnnnnnnnnngcctttgtggcagcactccagcgctgagcgcattacgttgacgttgccgatacattcgaagctaaagtccacgccgccgtcggtcagctcaacgatcacgtcctgaaccggtttgtcgtagtctttcgggttgataaagtcggtcgcccccactctcacctgcgagcttaaatttctccgggttggtatccacagcaatgatacgcccagctttcgcctgtaccgcgccctggataaccgccagaccgatcccgcccaggccgaacaccgccacggtgtccccctctttcactttcgccgtgttatgcaccgcgccgataccggtggtgacaccgcagccgagcagacagactttatccagcggggcctgcggattcactttcgccagtgagatctcggcgcacacagtgtattcgctgaaggtgctggtacccatgtagtgataaatgggctcgccgttataggagaaacgggtggtgccgtccggcataagtcctttgccctgcgtggcgcgcacggcctggcagaggttagttttgccggatttgcagaacttacactcgccgcactctgcggtgtagagcgggatcacatggtcgccgggcttcaggctggtgacgccttcacccacttccaccaccacaccgcccccttcgtggccgagcaccgccgggaatacgccttccggatcgtcaccagacagggtaaacgcatcggtatggcaaacgccggtgtgggtaattttgatcagcacttcgcctttcttcggcggagcaacatcaatttcaacgattttcagcggctggcctgggccgaacgcgacagctgcgcgagatttcatgatgtctttcccttgttgtgaggtgtgtgggtttattttagataagagcgcagtaaatggccgacttccgccatccgcactgcccgctgatccggggtgctctcccccgtcaccagctcatctttgaggtgaatttcgaccatttcacccatcaggccattggcagcgccgcgcacggcggcaatttgctgcaaaatggcgagacagggatcgcccgattccagggcgcgttcaagggcatcaacctggccccgaatgcggcggacgcgggtcagaatacgttttttatcttcgggtgaatgcggcatacgccctcctgatactataggggggtattgtatctgttaatacgattttatgtaaacatgaagtttagtgtgggttttaagtagagccgtaggtaatgtgaaaaatcagcgtctggagttaatattggtgactcgctgatataccagaagtgggcaatcaggtgcgtcatgagcgaaaagtagattggataaatccatggcagacatgcactgctcctttaaaattaacgtgttggtcgttcttgttattaagtgtaatgcaggtgtggtacagatgaagacatacaacgtcattctcccttaaaaatcctacttttaaagacttgtgcaagcacactaccccccactaaagaatgtaggtgtcataagaatacgaaaaagaatagactaatacatgttggatatatttatctttgataacatttagcctgtagtaaacaaaataagtcggatacagcatgttcggacagaaaacattgctgaaactggttcggatccggtttatctaatagaatttctatacactttgataaatattactatcacaattgggtttacaaattgaattcggatcacaacgcttcatcattaaggaatgactaagtatgaaaagaattgttctcgcctctttggttttatctttttcgttatctgctaacgcaaatcaattaagcattgatgaccaaattaataatgcttgcgctaaggccttaagcggtgacaaagaacctttgggtgacttcccgccagatagttatgctgcaacagtcagtccgaaagttaaagatgcttacaacgaagttttaaaatctcggtcctctattgtaaacgatcagagtttacagaatgcaaccagttgcgccaaccttgttagagataaactgaaatcaaaaggtgagtacacagaagaaaaataattgccagggtggagaaacagcattttttgtggaactgaacgctttctctatcagagtacgttcttaagaaaatatcgacaagatagttccgcagctgtgttttccacctctcgctggtccctcaataccctaacatcccgttgccagaaggcaccctccgtaatgacagcgcccgcctaaacagcacagacgagtctgacgatatttacgctttcgtctcgtcgtgaccaaccttatttagctcaaaatgttaaaaatccgcacttatatggcacaatgtgaacagaaataacattctcgtcacctaacatactcgctacaaacaaaatggtggtgttaatgattgtactaaagagctttttattcttcgttggcgcagcggccgcttgcgcacttatcgtactgtgtctttgggttgatatgcggtttgtcggccatgatattccggaattatcactgaccgaaattatgcaggaaacggtattagcgactattgtctttctccattttcgtctggcgaaaatggacgaatccatgcgttactgtaatattctggtgggcggatttttcctgacaatgctaattcgtgaactggacgcgctttttgatctcatttctcatgggagttgggtgtggttcgcgctgattaccgctctgctggcgttaattcgccccgttatgcattttcgcgctaccctggaacagctggcaaaatatacccaatccccctggtacggcattctgttgagcggcctgctggctgtactggtcttctcccgcctctttggaatgcaggtgctgtggcacgacatcctggagcatggctatatgcgtgtcgtgaaaaacgccgtggaggaaggttcggaatcattcggctatatgctgtgcctggccgcatcccttggctattacgttacctttcacactcacgcacggcagaaacagtctcttcgcgctgcgtagagaaagatggcgagggaaatatttatcaacgacattttttggacgttgtggtggtcatgtaagaaagacatgtcctaaaaaggggcaatctgccgtcgaattcagcgaattctcgctcactgctgcaatcagcgtctattcttagactaccaacaaaaggaggctggaatgtctgatttcgacactgataaaaatgcacagtacgctggcgataaagccaaaaacaaacttgatgaattatccggctctgcgcagcagcagtttggtgaattcgttgattcccctaaacaccaggtgaaaggtgcagcgaaaaaatatgctgcccaggccagtgatgccgtctcggatgtcactgaagccgtcagaaacaatcccttaacgggcttaatcgctgcgggtgcggtaggtatcgttctgggacttctgctgggacgtaaataatttcaggcccttcggggccgtttccttttcccttctttcctgctctttcccccccttacctagttgtatagttttccttgacaaaannnnnnnnnnnnnnnnnnnnnnnnnnnnnnnnnnnnnnnnnnnnnnnnnnnnnnnnnnnnnnnnnnnnnnnnnnnnnnnnnnnnnnnnnnnnnnnnnnnnnnnnnnnnnnnnnnnnnnnnnnnnnnnnnnnnnnnnnnnnnnnnnnnnnnnnnnnnnnnnnnnnnnnnnnnnnnnnnnnnnnnnnnnnnnnnnnnnnnnnnnnnnnnnnnnnnnnnnnnnnnnnnnnnnnnnnnnnnnnnnnnnnnnnnnnnnnnnnnnnnnnnnnnnnnnnnnnnnnnnnnnnnnnnnnnnnnnnnnnnnnnnnnnnnnnnnnnnnnnnnnnnnnnnnnnnnnnnnnnnnnnnnnnnnnnnnnnnnnnnnnnnnnnnnnnnnnnnnnnnnnnnnnnnnnnnnnnnnnnnnnnnnnnnnnnnnnnnnnnnnnnnnnnnnnnnnnnnnnnnnnnnnnnnnnnnnnnnnnnnnnnnnnnnnnnnnnnnnnnnnnnnnnnnnnnnnnnnnnnnnnnnnnnnnnnnnnnnnnnnnnnnnnnnnnnnnnnnnnnnnnnnnnnnnnnnnnnnnnnnnnnnnnnnnnnnnnnnnnnnnnnnnnnnnnnnnnnnnnnnnnnnnnnnnnnnnnnnnnnnnnnnnnnnnnnnnnnnnnnnnnnnnnnnnnnnnnnnnnnnnnnnnnnnnnnnnnnnnnnnnnnnnnnnnnnnnnnnnnnnnnnnnnnnnnnnnnnnnnnnnnnnnnnnnnnnnnnnnnnnnnnnnnnnnnnnnnnnnnnnnnnnnnnnnnnnnnnnnnnnnnnnnnnnnnnnnnnnnnnnnnnnnnnnnnnnnnnnnnnnnnnnnnnnnnnnnnnnnnnnnnnnnnnnnnnnnnnnnnnnnnnnnnnnnnnnnnnnnnnnnnnnnnnnnnnnnnnnnnnnnnnnnnnnnnnnnnnnnnnnnnnnnnnnnnnnnnnnnnnnnnnnnnnnnnnnnnnnnnnnnnnnnnnnnnnnnnnnnnnnnnnnnnnnnnnnnnnnnnnnnnnnnnnnnnnnnnnnnnnnnnnnnnnnnnnnnnnnnnnnnnnnnnnnnnnnnnnnnnnnnnnnnnnnnnnnnnnnnnnnnnnnnnnnnnnnnnnnnnnnnnnnnnnnnnnnnnnnnnnnnnnnnnnnnnnnnnnnnnnnnnnnnnnnnnnnnnnnnnnnnnnnnnnnnnnnnnnnnnnnnnnnnnnnnnnnnnnnnnnnnnnnnnnnnnnnnnnnnnnnnnnnnnnnnnnnnnnnnnnnnnnnnnnnnnnnnnnnnnnnnnnnnnnnnnnnnnnnnnnnnnnnnnnnnnnnnnnnnnnnnnnnnnnnnnnnnnnnnnnnnnnnnnnnnnnnnnnnnnnnnnnnnnnnnnnnnnnnnnnnnnnnnnnnnnnnnnnnnnnnnnnnnnnnnnnnnnnnnnnnnnnnnnnnnnnnnnnnnnnnnnnnnnnnnnnnnnnnnnnnnnnnnnnnnnnnnnnnnnnnnnnnnnnnnnnnnnnnnnnnnnnnnnnnnnnnnnnnnnnnnnnnnnnnnnnnnnnnnnnnnnnnnnnnnnnnnnnnnnnnnnnnnnnnnnnnnnnnnnnnnnnnnnnnnnnnnnnnnnnnnnnnnnnnnnnnnnnnnnnnnnnnnnnnnnnnnnnnnnnnnnnnnnnnnnnnnnnnnnnnnnnnnnnnnnnnnnnnnnnnnnnnnnnnnnnnnnnnnnnnnnnnnnnnnnnnnnnnnnnnnnnnnnnnnnnnnnnnnnnnnnnnnnnnnnnnnnnnnnnnnnnnnnnnnnnnnnnnnnnnnnnnnnnnnnnnnnnnnnnnnnnnnnnnnnnnnnnnnnnnnnnnnnnnnnnnnnnnnnnnnnnnnnnnnnnnnnnnnnnnnnnnnnnnnnnnnnnnnnnnnnnnnnnnnnnnnnnnnnnnnnnnnnnnnnnnnnnnnnnnnnnnnnnnnnnnnnnnnnnnnnnnnnnnnnnnnnnnnnnnnnnnnnnnnnnnnnnnnnnnnnnnnnnnnnnnnnnnnnnnnnnnnnnnnnnnnnnnnnnnnnnnnnnnnnnnnnnnnnnnnnnnnnnnnnnnnnnnnnnnnnnnnnnnnnnnnnnnnnnnnnnnnnnnnnnnnnnnnnnnnnnnnnnnnnnnnnnnnnnnnnnnnnnnnnnnnnnnnnnnnnnnnnnnnnnnnnnnnnnnnnnnnnnnnnnnnnnnnnnnnnnnnnnnnnnnnnnnnnnnnnnnnnnnnnnnnnnnnnnnnnnnnnnnnnnnnnnnnnnnnnnnnnnnnnnnnnnnnnnnnnnnnnnnnnnnnnnnnnnnnnnnnnnnnnnatcgagctggtcgaaaattatgccggattatattttgcgtatgtcacacattacatcaacgtggtaccaaaagaacgacgccatgctgtcaacatgacgcctacactctgatctgacgggcgttcggtttgctgaacgccttttttaccgctcgcgcagcgcctcttttgccttattcaacggtttcagcagataatcaatgacggatttactgccggttttgatatcaaccgtggctatcatgcccgggaacaccggaaattccttgccctgcctgttggtcagatggttactgtctgtacggatataaacgcgataataataaacatcccgtttcacctcgtcctgaagggtatccggggaaatcatcgtcacctccccttccagcccgccgtagatggagtaatcataggcggtgactttcaccagcgctttttgcccgggatggataaacgcgacatcgcgcggcgagattttcgcttctatcaccatctggtcatcaagcggtaccaggctcatcagtttgccgttcggcgggatcaccccgcccaccgtcgtcacgtcaatgtccttcacgatgccacgcaccggcgcattaaacgttaagcgggtgagtgaatcttcgcgtcctttcatgaccgaacgctgcgcttccatttccgcgttcgcttttgccagttcttcgcgggcgcgaacgtagtactggtttttcatttcggtgattttgctctccagctcatttttttgacgttcaaggcgtaagacttcgaccttactggccgccccctgcgtcaccagcgggcgcgttaatgccagttcacgctgcacgagatctgctccctggcgtaaacccgccagccctttttcaaggctttcacgacgtgactgataaagcgccgtttcctgtttgaccaactcaacgtcgtcatccagctctgccggaaatgtcagcccggtgtcgtttacctcagcattcagacgcgcggccgtcgccatcgcagcgtttaatcgagactcgctctccagcacgctggactcggttttcgtccggtccagttgggcaagctgttgaccacgctcgacgatatcgccttcgcgcaccatcagactgtggataatccccccttccagggactggatcacctgctcgtgggaggacgggatcaccttgccgctacccgtcgtgacctcatccagctggaacaggctggcccaggtaataaagaacaccagcagggcaaacagcgaccatgccaccagcgacgaacgcggcaggcgcggctccttgagccggctgttaaagcgggagaaatcattcatgccacgccctccgttttcagtttaaccgtgcgctgcggcgcctgctgcggggccattccgtgctggcgtaaaatggcatcacgagggccatccatcaccactttgccgttttccaggacgatgatgcggtcaaccaggtccagaatcggcagacgatgcgtcgccaccaccagcgtccggcgcttaccgagccactggtgcagatgctggataaactgcttctcgctgacctcatccagccaggcggtgggttcatccagcagcagaatattcggcgaggtgatcagcgcgcgcgccagcagcagcgcctgacgctgcccgccggaaagccccgttccgccctcattgatgatggtgttcagccccattttctgcttgcgcacaaactccagcgcgccgctgttgaccagcgcctgatggatttcctcgtctgtcgccagcggattacccatcaggatgttgtcgcgtacggagccgaagaacagccgcgcctgctggctgagcaactgcatgtcgcggcgcacgtcggccgggtcaagatgattgagagcaatatcgtccagcaaaatgctgccctgctgcggctcctgcattcccgccagcagatgcagcaaggtgcttttccccgaaccattccgcccgagcaccgccacgcgctctccggcgcgaatgcgcagtttgctgatattcagcacggtaagcttctcttcttcatcgtaataaaacccaacgtcgtccagccgataatcaccgcgcagatgggctttatgcacttttttgccgtgctggggatcgtcaatcgggcgctgcatcaggtcatccagtcccttgcgggccacctttgccgactgccagcgggagagcacgccggaaatctgcgacaggggcgcgatggtgcgggacgccagaatcgaggtccccaccagcgcaccggtggtcatgtcgccgctgataaccagataacaccccaccagcagcaccacggcgtagacgatagactgcacctcctgggtccaggtcagcagcagccccgtcagccagcgctgcttcatgccgacgctcgcggcaacgtcattggtgttattccactggttctggaacctctgctcggcgcgcattagcttgatgtcctcaagcccctgcaccgcttccaccagcgtggcgttacgaatcgccgattcacgcatcccttcgctggagagttttcccagcgggcgctgcaccagcaggccgggaatgagcagcagcggtacggccagcagcaccaccagcaccagcgggccgccaatcatccacagaatgaagacgaacagcaggaagaacggcagatcggagatagcggcaatggtggtggaagtgatcagctcccgcaccgactccagctcgcggatctgggcgataaacgacccggtcgatttcgaccgtgcgccgtttttaatcctcagggcgtgggcaaacacgcgctcggaaatacgcaggtcggcgcgtttccctaccacgtccgaaatatgcacccgcagcatgcgcatgatgaattcaaacacgatggcgatcatcacaccgccaaacagcacccacagcgtggcctccgactgggacggcaccaccctgtcatacacctgcatggaaaagaccatgccggagagcgccagcacgttggcgaccagcgccaccagcattatgtcgctgtaacgacgccagtctttcagcgccagctgccagaaccagtttttctcatagggtttgatgtaatcatccacgcgcgcatccggcgtggactccaggggacgcagcaccatcagcccctttaaccgcgaaccgagttcgtcgcgcgtcagcgtcgtctccaggcccccgtcgccgctaaactgcacgctgacgttcccttcgttgtccatacggttgatgaccgcaatttgcccgccggtgaactccgccagcagcggtaaacgccacggatcgagtgctacggctcccgccgccacccaacgcatccccagcccaagctggcgcgccatctcctccagcaccagctggcgtggagactggctttcatggttaatcgtgacccgaacatgctccgccgaaaaatccagccgataatatttcgcgatgatgagcatgccctgcaaccagggttcgtactgtggatgtgtcttcataatgctacgtcctgttcagggcgatgatttcgcactgaaatgatacctttccgggatgattagaaatcgaacactgtctaaacgagcccgcaaaataatcttgtgaaatatagggttatggctattcgtgtaaagaaacgcaaaaggccgcgaggatcgctccccgcggcgttgttttacgcaattaacagttgatgattggccaacagcgtcgccagatccgtctgcacgccgttcagcgttaccagcgtggtgggcgtgaactgaccgcccgtcccgtccaggtcaacctggatctcggtgttgctgccgttttgcacaacgcggatgtagtcggcgatgttgcccgcgctgctgtccagcgtcgccacgccgttcacgtagctcgccgagccggtgccggtatagccgctgtcggaaagcaggtcgcgcagatcgatacggtccgtatccgccgttccttcccaggtgccgacggtaaagccgttcaccacatcgctaccgttgccgcccgtcgcgtcagacgcgttgatcagcttatagagcaacgtatcgtgaccgccgctgccgatgttgaaggtgtcgttcccgccccggccttcgaactggttatcaccgctgttgccggtgatcacgtcgtcatagtcggagccgttaatcccttcaatattcaacaaccgcgtggtaccgaatccggtgtcctgcgccgttgagaggcgcaaatcaacggttatcccagaggtggcattacgataatccacaacgtccatgccgccggtattgctccaggtgtcgtagtcggaatgggtattccagccgccggagccgttataggtataggtcccatcctctgcgataaaggtgtcgttatacccggtaccggtgatggttccgctgtggccgccggtggccgcttcggcggtgagaacataaccctctttgccgttgcccgcgtccaggccggtccaggtgacgttatccgagacgccgttggtgatcttcacgatctccgccgagtaggtttcgttcggatccagcccgtagaaactcaccagcgcagaggtatcgttcgagccaatgccggactgagcgttgatgatctgcgaggccaccagcacgcccgcagcgttatacagattgaccgtattaccgtagtacgcgttgatgccttcgctatcgacaatgtgcagatgcatcgcggtaccgtcagcgatctccgcattgttctgcaccagcaccaccttaccgttctgctgagacaccagcagatcctgcgcaccgtcccagttgtagtccaccgcggcgacgccggtaacgttcgccaggccggaagccagctggcttgaggtccaggttgagccgtagccgttgttggtgaacagggtcgccgtctgtgagctgccgtaggtgctgagcttgatgatgtccatctgcccgtcaccgttccagtctaccgccaccgacagatagcccgccgaggcgttagaggcttctaccgcgctcttggtcgtggaaagctgtcctgcaccgttgttgtagtaaatcaccccgccggtattgttgtagctgctgcccaggtacagatccatgtagccatcgccgttaaagtccgcccacgtcatggaggccgccgtggtggtattcgccgcgttggccacaaacacgttggtcaggttctggccaatggaaagcgtaccgttcccgttgttgttaatcacggtgagcgagtacgccccgctgcggttggtgtgctgcacgatgtccacggtaccgtcgttgttcaggtcgacgccggagatttcacgcccggaatcgaactggccgtagaatccaccttccccgccggtcccgtccggcgacagaacgccgttggtattcaccaggtaggtcagggagtccataccggcatcgccgtacgccagatcaagatagccatcgccggttttgtcgtaggcaattacgccgccgtaccagatggtggttcccatcgccagttggctggcggtgtagctgctgccatcgtaggtccacatcacctgcgtagaacccgcgtaggtgttctccgtcgcaaagatatcctgcgtgccgttacggtcaaagtcagctgccgtctggctcaccacatagtagctacgggtgttagttaacgtattcccggcataggttgaatcatcgctgctggaataagactgtccattagcaatgatattccacagcccgctgctgttcatgccgagagtcatggttgagttgttgctgttccccgcagtggtcgcccagtcggtattcaccgaggtggtatcgatcaccaggctgccggttgccgtaccggtggtgttaccgttgcccgcgctactcttcacctgcgcggttacgtcgtaactcgccacactcagggcatcgctgtccgggatctgtagataccaggtattgtgatccgggtcgacgaccaccgcaccgccggtctgggaggtgtaggttttcccgttcaccgtcaccaccagatattcaccgttcaccaggtctgcggagaccgtaccgctgacaatcggcgtggtatccgaggtggtctgggcagtaatcgccgcggtggtggtcgggatgctggtatcgacgttcagcacaaagccatccgattccgtgtagttaccggctttgtcggtgacgcgcagaatataggtgtgattcccgtcaagcaggccgttgtcctgataggaccagcttgcgctgccgttcatcgtgacctgacccagcaagatcccgtcccggtaaagctgcacgatttcgccatcttccggagcgcggttaagcgtaccgttgatcagcggcgaggtatcgtccgtcgcgactgatgcgccgtacgtgcctgtacgttcaccttccccgtcggtatagctgaccaccgttcccaccgtgtcaggcggcgtggtatcaaccgttaccacctgcgaagaggttgagccgacgttgcccgcctggtcgatgatccgcacctggtaggtgtaatccccgtccgccagatcgcgggtatccgtatagctccagcgctggttagtgacggtagtgtcaatccaggtattaccgccgtcgaggctgatctgtacgcgctcgtcgctggccagcgcgctgcccaacgagccgttgatcgtcagcgaggtgtccatggtgatgaaatcactcccggactgcccggtatcttcgctgatgctgtcaatggtgatgccgtactgcggcgcctgggtatccaccgtcacgtcctgcgtggtggtggccccaacgttgcccgcctgatcgacaacccgcacctgatagcggtagtcgccgtcggccagggtgcgggtgtcgttataactccaccgggtgccgcttaccgtggcgtaaacccaggtggtgccgccatccatgctcacctgcacatactcacccgccccgagttcggccccgagcgtcccgttgagcgtgtacgaggtcgaactggtcaggaagtcgttattgtcgaagccggtatcgacggtgatgttatccacggtcaccgtaatcgccgcatccggcgcgaccgtatcgaccgtcacctgctgatgagcgctggcacccacgttgcctgccgcatccactacgcgaacgtagtagtcataggtctggttacccagcgtgcggccgtccacgtagtaccagctgttgccagtgacgatcacgttctgccaggtgaccccgccgtcgatgctgatctgggcatattcgccgtcggccagcgttgcgccgagcgagccgtgcagcgtcagggaggtatcattggtgataaagtcgctgctgctcaggccggtatcgtcgctgatgctgtcgatagcgatcgttttgctggcgtccggcgcgacggtatcaatggtnnnnnnnnnnnnnnnnnnnnnnnnnnnnnnnnnnnnnnnnnnnnnnnnnnnnnnnnnnnnnnnnnnnnnnnnnnnnnnnnnnnnnnnnnnnnnnnnnnnnnnnnnnnnnnnnnnnnnnnnnnnnnnnnnnnnnnnnnnnnnnnnnnnnnnnnnnnnnnnnnnnnnnnnnnnnnnnnnnnnnnnnnnnnnnnnnnnnnnnnnnnnnnnnnnnnnnnnnnnnnnnnnnnnnnnnnnnnnnnnnnnnnnnnnnnnnnnnnnnnnnnnnnnnnnnnnnnnnnnnnnnnnnnnnnnnnnnnnnnnnnnnnnnnnnnnnnnnnnnnnnnnnnnnnnnnnnnnnnnnnnnnnnnnnnnnnnnnnnnnnnnnnnnnnnnnnnnnnnnnnnnnnnnnnnnnnnnnnnnnnnnnnnnnnnnnnnnnnnnnnnnnctgatattccccgcgtcgtcaatcacccgcagctgatagttgtagtctccgtcggccagcgtgcggccgtcaacgtaggtccagctcaggccgctgacgctcacgtcagtccaggttgcgccaccgtcgaggctgatctgagcgtggtcaccgctgcccagggccgcgccgagcgtccctttcaggctgatctggttgtcgctggtaataaagtcgctgtcggacaggccggtatcctgcgagacggaatccacggtaatagtcgccgccgcaggcttcgtcagatcgattaccacgtcctggctgtccgttgccccaacgttgcctgcattgtcgatcacgcgcacctggtactggtacgtaccgtcggtcagggtacggccatcggtgtagcgccaggtggtgccggtgacggtcaggtcaatccaggtagtaccgccgtcaaggctgatctgcgctttctcgttattgccgagctgcgcggtcagggaaccattcaccaccacctggctgtcgttggtgatgaagtcattcgcgctgaggccggtatcgttttgcagggaatcaatgctgatccccatcgacggtgcggtgagatccacggtaacggtatggttatcgctggcgctgttgccgatggcgttgctcacctgcgcgttaatcacgtacgaaccgccgtccgccagcgcggtcacgtctgcgctgccgaccgtatagctccaggtgccgtcattttgaacggtagccgtgtaggttttaccgttaagcgtaatggtcaccgtctggcccgttggcgcatcggtggtgccgctgataaccagcggcgtgccgtgctcggcggcgttgacgatatcatcctgcgcaaaggtgttaatggcgatggtcggcacgtcgccgttcagcgtcacgtcgtgcgttgcgctgcccgggttacctgccttatcgctcaccgtagccgtaatggtgtaatccccgtcgctcagtccgaggaagtcgcgtcccggcacgaagacggaccaggagccattcgccgccacggtcgcctgatagctgtggccgttgaaggagacggtcaccgtctggccctgctccgcggtggtggtcccgctgatggtctgtcccgccagctgctcggcgttgttgacgatatcgtcatcggccacggtgctgatggtcacggctggcgcgacggtatcgaccgttaaggtatgcgtcgtctggccgttattacccgccttgtcgttcaccgacgcggtgaccgtcagcgcgccttcgctcaggttggcaagatcggcggccgggacgtcgagcgtccaggtgccgtcgtttgccacaagcgcagtgtaggttttcccgcccagcgtgacggtcaccgtctggcctgcttccgcgctggaagagccgtgtacggtgagcggctgttgggcttccgccgcattcagcacatcgtcgcccgacaacgtgttcacgctaatcaccggcgcggtggtgtccacgctgatggtgtgcgtcgccgaggcgctgttcccggcgctgtcctgcgccgaaacagaaacctggtagctcgcgccgtcggccagggtgcccacgtcggcggccggtacggtggttgtccaggagccatcgctctggatagtggccgtatagctcttaccattcagggtgatagtgacctgcgtgccgttagcaaactgcgcgctggagccgttgatgaccagcgacgcccccgcttctgccgcattgatcacgtcatcaccgctgagggtgttgacggtcagcgcgaccgatgcggtatttaccaccacgtcatgggtctgggtgctgctgttgcccgcgctgtcggtgattgtcgcgctgagggtcacggtgccgtcggtcagggcagaaatgtcgctggcaggaacgccgacgctccatttgccactggcgtcgacggtggtggtgtactggttcgaacctatcgtgatgaccagcttatcgccgacgctggcgccggttgcggtgccgctgacgacctgcgcctgcccgtgctcaacgctgttgatgacgtcatcgcccgccacgacgttaaagctgacggtcggcggcgtggtatcgagcgtaatcgctttgcccgcgctgcccgggttacccgcggcgtcactcacgctcacctgcacggtgtagccgttatccgtcagagtggacagatcggcggccggcacgttaatgctccagacgccgccctgctgaacctgtgcggtatagctgtttccaccgaggttaacggttaccgtctgaccgacttcagccgtggtggtgccggaaatggccacgcccgcagccgcttcgctgccgttgatcacgttgtcgccggctaccgtgtcaatggtcacggttggcgccgtggcatccacgctgtactcccggcccgcagacgcgctgttgccgttcacattggtcacgctcacctgcacgctggcgtcgccgtctttcagacccgcaagatccgaggaaggcacggtggccgtccagttgccgtcggcatcgactttggcggtgtacgtcttgccgccgaaggtgatggtcacggtctggttctcttccacattggaggtgctgccggaaagcaccagatccgcacctttctccgccgcgttaatcacgtcgtcggtggcgatggcatcaatgctgatcgccacggctgccagatcgacggtgacgtcgtggctgatagagaccggattgcccgccgcgctctggcctgcaacggtcacggtaaccgtgcccgcagccagggccccgacgtctgctgccgggatcgccgcgctccaggtaccgtctgccagcacggaggccgcataggttttgccattgacggtcacggtgagcgtagtgcctgccgccagtccgtcgctggagccggtgacaatcaggttctgtccatgctcgatgctgttaatcacatcgtcgcccgcgacggtatccacgcgcaggcccggcaggctggcgtcgatagtgatatcgcgctcgcccgttcccgtattgccatggtcattagtgacggttgctgacaccgttaaatcgccattgcccagcgccgtcaggacggattccggcacgttaacggaccaggtcagatcgctctgcaccgtcgcggtataggtgttgccgccgatgttcaccgtcacggtgttaccgatgtccgcgttcgccaccttaccggtaatggtctggcctgcggccacttccgccgcgttgacgacgttatcccccgccacggtgttgatggtgacggttggcagcgcggtatcgacaagcaggttcgccgtagtgctgatgctgttgcccacgccgttggtggccgtcgcgctcagggtgtagctggcttcaccgaggcctgacagatccgcagccggaacggtcaggctccaggtgccgtctgccgaagtcgtcgccgagtagtttttaccgttcagggtcacggtgaccacggtgccttccgccaggttggcgctggtgccgttgacgctcagatcctgccctttttctaccnnnnnnnnnnnnnnnnnnnnnnnnnnnnnnnnnnnnnnnnnnnnnnnnnnnnnnnnnnnnnnnnnnnnnnnnnnnnnnnnnnnnnnnnnnnnnnnnnnnnnnnnnnnnnnnnnnnnnnnnnnnnnnnnnnnnnnnnnnnnnnnnnnnnnnnnnnnnnnnnnnnnnnnnnnnnnnnnnnnnnnnnnnnnnnnnnnnnnnnnnnnnnnnnnnnnnnnnnnnnnnnnnnnnnnnnnnnnnnnnnnnnnnnnnnnnnnnnnnnnnnnnnnnnnnnnnnnnnnnnnnnnnnnnnnnnnnnnnnnnnnnnnnnnnnnnnnnnnnnnnnnnnnnnnnnnnnnnnnnnnnnnnnnnnnnnnnnnnnnnnnnnnnnnnnnnnnnnnnnnnnnnnnnnnnnnnnnnnnnnnnnnnnnnnnnnnnnnnnnnnnnnnnnnnnnnnnnnnnnnnnnnnnnnnnnnnnnnnnnnnnnnnnnnnnnnnnnnnnnnnnnnnnnnnnnnnnnnnnnnnnnnnnnnnnnnnnnnnnnnnnnnnnnnnnnnnnnnnnnnnnnnnnnnnnnnnnnnnnnnnnnnnnnnnnnnnnnnnnnnnnnnnnnnnnnnnnnnnnnnnnnnnnnnnnnnnnnnnnnnnnnnnnnnnnnnnnnnnnnnnnnnnnnnnnnnnnnnnnnnnnnnnnnnnnnnnnnnnnnnnnnnnnnnnnnnnnnnnnnnnnnnnnnnnnnnnnnnnnnnnnnnnnnnnnnnnnnnnnnnnnnnnnnnnnnnnnnnnnnnnnnnnnnnnnnnnnnnnnnnnnnnnnnnnnnnnnnnnnnnnnnnnnnnnnnnnnnnnnnnnnnnnnnnnnnnnnnnnnnnnnnnnnnnnnnnnnnnnnnnnnnnnnnnnnnnnnnnnnnnnnnnnnnnnnnnnnnnnnnnnnnnnnnnnnnnnnnnnnnnnnnnnnnnnnnnnnnnnnnnnnnnnnnnnnnnnnnnnnnnnnnnnnnnnnnnnnnnnnnnnnnnnnnnnnnnnnnnnnnnnnnnnnnnnnnnnnnnnnnnnnnnnnnnnnnnnnnnnnnnnnnnnnnnnnnnnnnnnnnnnnnnnnnnnnnnnnnnnnnnnnnnnnnnnnnnnnnnnnnnnnnnnnnnnnnnnnnnnnnnnnnnnnnnnnnnnnnnnnnnnnnnnnnnnnnnnnnnnnnnnnnnnnnnnnnnnnnnnnnnnnnnnnnnnnnnnnnnnnnnnnnnnnnnnnnnnnnnnnnnnnnnnnnnnnnnnnnnnnnnnnnnnnnnnnnnnnnnnnnnnnnnnnnnnnnnnnnnnnnnnnnnnnnnnnnnnnnnnnnnnnnnnnnnnnnnnnnnnnnnnnnnnnnnnnnnnnnnnnnnnnnnnnnnnnnnnnnnnnnnnnnnnnnnnnnnnnnnnnnnnnnnnnnnnnnnnnnnnnnnnnnnnnnnnnnnnnnnnnnnnnnnnnnnnnnnnnnnnnnnnnnnnnnnnnnnnnnnnnnnnnnnnnnnnnnnnnnnnnnnnnnnnnnnnnnnnnnnnnnnnnnnnnnnnnnnnnnnnnnnnnnnnnnnnnnnnnnnnnnnnnnnnnnnnnnnnnnnnnnnnnnnnnnnnnnnnnnnnnntggtagcatccacgctgtactcgcgtcccgcagacgcgctgttgccgttcacgttggtgacgctgacctgcacgctggcgtcgccgtctttcagaccggtcagatccgcagacggcaccgtggcggtccatttaccctcagcgtccaccgtggcggtgtagttcttgccgccgaaggtgatggtgacgatctggttttcttcgacgttcgaggtggtgccggagagcaccagatccgcacccctctcggcggcgttgatcacgtcatcggaagcgatggcgtcaatgctgatggcgacgtttgccagatccaccgtcacatcatggttgatagtcaccggattgcccgcgctgctctggccttcaacgttcacggtgaccgtgcctgcggcaagggcactcacgtccgcagaagggatcgccgcgctccaggtgccgtctgccagcacggtagccggataggttttaccgtttacggtgacggtcagcgccgtacccgccgtcaggccgtcgcttgaacccgtgataatcagattctgcccgtgttcgatgctgttaatcacgtcatcgcccgctacggtgtccacgcgcaggcccggcagattcgcgtcgatagtgatatcgcgctcgccgctgccgctgttgcccacgccgttcgtgacgctggcggtcacggtcagatcgccattgcccagcgcggtgagcacagactccggtacgctgacggaccaggtgagattgtcctgtaccgttgcggtgtagctgtggccgccaacagacacagtcacggtgttgcccgcttcggcattcaccactgtgccgctaatggtctggccggttgccagctccgctgcgttgatcacgtcgtcgcccgccacggtgttgatgatgacgccaggcagcacggattccacgttcacggtgtgcgaggtgctggagctgttgccgacgctgtccgtcgcggaggccgacacggtgtaaagcgcttcacccagttgccccacctcgctcgccggaacggttgtggtccattggccattggtgtccaccgtggcgctgtacgctttgccgttgagcatcacggtgaccaccgcgcccgctgccagcccggaagccgtacctgtgatggtcagatcctgcgttttctcgctgctgttgatcacatcgtcaccggacacggtgtcaatggtcagcaccggcgcggtgaggttgacttcaacctcgtgcgttgtgctgttgctgtttccggctttatcggtcagcgccgcggtgatggtgtaatccccggcggccagggcactcacgtccgccgcaggcacgcccacgctccacctgccggaagtgtccagggtcgcggtgtaatctttgttattgatggtgacggtcaccacgtcgcccgccgccgcaccggtcacggaaccggtgacaatcagcgcctgcgcatgctcggcgctgttgatcacgtcgtcgtcggaaacggtgttaatggtcagctgtggcaccgtggtatccaccagcacatcgcggtccgccgaggccgggttacccgccttatccgcgacggctgccgtgatggtgtaatcgccgtcggtaatcgcgccgatatccgcagacggtacggtgacgctccagctgccgttcgcctgtacggtggtggtgtagtccacgccgttcagcgtcacggtcacggtctggcccgcttcggcgttggagacaccgttaacgaccagatcctgctgcgcttcggccgcgttgatgatgttgttgtcgctgacgatctcgatggacaccgtcggcgcggtggcgtccacgctgtattcgcggcccgccgaggcgctgttgccgttcacgttggtgacgctgacctgcacgctggcgtcgccgtctttcagtccgcccaaatcggcagacggtacggtcgccgtccagttgccactggcatccaccgtcgcggtgtacaacttgccgccgaaggtgatggtaacggtctggttttcttccacgttggtggtcgagccagacagcaccaggtccgcgcctttctcagccgcgttgattacgtcgtccgaggcaatcggattaatgctgatggcgactgccgccagatccactttcacgtcgtggctgatggaaaccgggttacccgccgcgctctggccgtcaacggtcacagtgattgtgcctgcgctcagcgcgccgacgtccgccgccggtatagccgccgtccaggtgccgtccgccagcacggttgccgcgtaggttttgccgttgacggtgaccgtcagcgccgatccgctcgccagcccgtcgctggagccggtgataatcaggttttgaccatgctcgatgctgttgatcacatcgtcgcctgccacggtatccacgcgcaggcccggcaggctggcatcaatcgtgatgtcgcgttcgccggtgccggtgttgccgtggccattggtcacgctcgctgttacggtgagatcgccgttaccgatagcggttaagacgtcagacgccacgttaaccgaccagctcaggtcgtcctgaaccgtcgcggtataggtgttgcccccgataccgatcgtgacagtgtcaccgctcgccgcgccgctcactttcccgctcagggtttgtccggaagccacttccgccgcgttaatcacgtcgtcggtggcaaccgcattaatggtgacctgcggcagcgcgctgtcgaccagcacgctatggctggtattcgcgctattacccgcggtatcggtcacgctggccgtcacgctgtagctcgcttcgcccagtaccgagacgtttgccgccggaacggtgacgctccagttaccgctggcatcggtggtggcggcgtaactgataccgttcagggctacggtgatgcgggtcccgtccggctggttgctggtgccggagatcaacaggtcctggcctttttcggtcgcgttgatcacgtcgtcaaccgccagggtattgatggcaatcaccggcgcggtcagggagacgtcaaacgcgtgcgtcgcgctggtgctgttgcccgctttatcggtgagtgtggcggaaatcgtctggtcgccgttaaccagcgcgcccacgtccgccgccggaacgcccacgctccagttaccggcaccgtccagcatcgcggtgtagtctttgccgttcagggtcagggtaatcacatcgcccgcctgcgcgcccgtcaccttgccggtgacaatcagcgcctggccgtgctcggcaatattaacaatgtcgtcgcccgccacaatgttgaagataatctgcggcacggtagtgtcgaccagcacggacgcccccgcgctggccgggttgcccgctttatcggacacggtcaccgtgaccgccgcgctgccgtcggtgatgcctgccatatccgccgccggaacgtccagcgtccagttgccgttcgcctgcacctgggcggtgtactgattaccgttgaaggtcacggtgaccgtctggcctgcttcggcagtagacgtcccgctcagggtcagatcctgcgccgcctctgccgcattcagcatgttgtcgccgctgatggtgttgatggtgaccgctggcgcggcggtatcgacgctgaatgcctgcgaggaagaggccgcgttgccgttcacgttggtgacgctgacctgtacgctggcgtcgccgtccttcaggccgctcagatcggcagccggtacggtgcaggtccagtcgccgttggcatcgaccgtcgtggtccaggttttacccgcaaagataatggtaacggtctggcccgcttcaacgttcgaggaggagccggacagcaccagatcctggcctttttctgccgcgttaagcacgttgtcgtccgtcacgctgttgatgcttatcgccaccggggcgagatcgacatccacaacggtaccgatattcaccgggttgccggaggtatcctgcgcgctggcgctgatggtgagcgacccgtccgcccaccgggagacgtcggcagccggaaccgcagcctgccaggtgccatccgccagtaccgaggcggaataactcttgccgttgatggtcacggtgacggtgctacccgccgccaggtcggtgctggtgccggagataaccaggttctgcgcgtgttcaataacgttaataacgtcgtcaccggcgacggtatcaatgcgcaggccgggcagctgggcgtcaatggtgacatccagggaagacgatccggtattgccgtgcgcgtttgtcacgctggccgatacggtcaggtcgccgttaccgagcgcggttaactgactctgggttaacggcaggctccaggtgagatcgtcctgtacggtggccgtgtatgtctgcccgccgaggataatcgtgacggtatcgcctgatgccgcgttagaaacctttccggtcagggtttgccctgcggccacttccgccgcgttgacgatattgtcgcccgcgagggtgttgatggtgaccaccggcagcgagctgtccaccagcacatcgtgcgtggcagcggcgctgttgcccacattatcggtgacgctcgccgtcacggtgtaattggcttcacccagcgcgctcaccgcagaggcggggacggtaacgctccagttgccgctggcgtcggtggtggcggtgtagttgataccgttcagattaacggtgatggtggttccttccggctggttgctggtaccggaaagcagcagatctgcgcccttctctgccgcattgatcacgtcatccgcggccagcgtgttaataccgataacgggcgtcacagtattgaccaccacatccactgaactgctgccggtgttgccggattggtcggtcacggagacgttaatggtccaggtgccgtccgtcagcccctgaacgacggacgcaggcaggccgaggctccagttgcctgccgcatccaccacggtggtgtagtccacgttattgatggtgatggtgaccaaatcgcccgccgccgcgccggtgacggagccgctcaggatctgcgcctgagcatgggccagctggttaacggtgttggtgtcggtgacgaaatcgttgatggtcacctgcggcacggtggcatccaccagcccaacgcggtccgcgctgctgctgttgcccgccacgtcactgacggtggccgtcacggtgacattgccatcggtcagcgcgcctacgtcggcggcaggcacgttcagctgccagcgaccgtccgcctgtaccgtggtctggtaagatttaccgttcagcgtcacggtgaccgtctggcccgcttcagcggttgtgctgccgctgagcaccagatcctgctgcgcttctgccgcattaatgatgttgtcgtcggtcaggttatcaagcgtaatggctggcggctgcgtatcgacgatcaccacgcgtgaggcgtccgcgctgttgccgttgacgttagtcacgctgacgctcacctgcgcacgcccgtcgttcagcgtttccatcgcgctcgccggaacggtcaggtgccaggagccgtcctgctgcacctgtgcagtaaaggtttgatccgcgaatttcaccaccacggtctgcccggcctccacgccctgcgtctgaccagaaagcgtgacatccgcacctttttccgccgcgttgagcatatcgtcagtggttacggtatcgatggtgacggccaccgcattcaggtcaagctcgatcgggtgttcagccgccacagtgttgccccaggcatcttnnnnnnnnnnnnnnnnnnnnnnnnnnnnnnnnnnnnnnnnnnnnnnnnnnnnnnnnnnnnnnnnnnnnnnnnnnnnnnnnnnnnnnnnnnnnnnnnnnnnnnnnnnnnnnnnnnnnnnnnnnnnnnnnnnnnnnnnnnnnnnnnnnnnnnnnnnnnnnnnnnnnnnnnnnnnnnnnnnnnnnnnnnnnnnnnnnnnnnnnnnnnnnnnnnnnnnnnnnnnnnnnnnnnnnnnnnnnnnnnnnnnnnnnnnnnnnnnnnnnnnnnnnnnnnnnnnnnnnnnnnnnnnnnnnnnnnnnnnnnnnnnnnnnnnnnnnnnnnnnnnnnnnnnnnnnnnnnnnnnnnnnnnnnnnnnnnnnnnnnnnnnnnnnnnnnnnnnnnnnnnnnnnnnnnnnnnnnnnnnnnnnnnnnnnnnnnnnnnnnnnnnnnnnnnnnnnnnnnnnnnnnnnnnnnnnnnnnnnnnnnnnnnnnnnnnnnnnnnnnnnnnnnnnnnnnnnnnnnnnnnnnnnnnnnnnnnnnnnnnnnnnnnnnnnnnnnnnnnnnnnnnnnnnnnnnnnnnnnnnnnnnnnnnnnnnnnnnnnnnnnnnnnnnnnnnnnnnnnnnnnnnnnnnnnnnnnnnnnnnnnnnnnnnnnnnnnnnnnnnnnnnnnnnnnnnnnnnnnnnnnnnnnnnnnnnnnnnnnnnnnnnnnnnnnnnnnnnnnnnnnnnnnnnnnnnnnnnnnnnnnnnnnnnnnnnnnnnnnnnnnnnnnnnnnnnnnnnnnnnnnnnnnnnnnnnnnnnnnnnnnnnnnnnnnnnnnnnnnnnnnnnnnnnnnnnnnnnnnnnnnnnnnnnnnnnnnnnnnnnnnnnnnnnnnnnnnnnnnnnnnnnnnnnnnnnnnnnnnnnnnnnnnnnnnnnnnnnnnnnnnnnnnnnnnnnnnnnnnnnnnnnnnnnnnnnnnnnnnnnnnnnnnnnnnnnnnnnnaggttttaccgttgagcgtgacggtaagcgccgttccctgggccaggtttttgctggtgccggacagtgtaaagccagcggcctgctcgctggcgttgatcacgttatcgcccgccgtggtggcgagcgtcacactggtatccgctgtagaaacggttacggtaatactgcccgcagaggtcgttttactgccgtcgatctgtacgacggaccaggtatgttccccgtccgcctgggtcgggagtgttaccgtccaggtgccgtccttcgcaaccatggtgctggcgatggtgctgccgttgccgtctttaacctgaatggtcgcgcccggctgcccggtaccgctaaaggttggggtgttgtcatccgtgacttcttttgcactcagcacgccctgcttgtcacccgcgttgtccgtcagcaaaaatgtcggcgtggcgctttcgacttctttagtattatcaataaccctggttttggtttcgccatcgccgccgtgagccagcagtgcgccgatcgcaccgccccctaacgccgcaccggcaatccagccccacggcgcatcgcttaagacgcttccctgctccaggaaaggttcaatgctgctaatgggtgcagcctgggcggttaattcggtggcggcaacgcctgatgcttccccggcatcggcaaatgaaatatgcgtcaacgcctggttatcgttaaataccagctcggaatgattatgggtttccgtgtcttcgacaaaataattattgcagcggatcacgctgccatctttcatataaatgaggaggtcattcccctggcggacataacgcaccacgtcctgagcagaaccctgaatttcaatcacgctcggtgaggaaatagagaccgagagattcccctctccggttaatttcgtcttctctgccgttttgcgaatgatgacatcaacaacttttgcggtactcatattcttctccttgcaggtgcgcgtattcctgtggatatgtccaccagagggatgtagctatccttgggaaaaatcacccattattgtctgacttatttcgcgcagaaaggcgcgcctttttttaacttaaatcaggtaatttcgcggcagcgtttttctctattccgataagcggcaagagattatccaccgcagaggcgtaattaatcgccgcactccagccatcgtattcagccattattttcgctgaggtggcagaccagacatcctgctccacgctgagcagatcgttaatgctgcgcttgctcagggtatattcatttttgtagacatcgcgggcgcgcaacgcattttccagctgacgcttcccggcttccattcgtccacgcgccccggtccagtcggcctgtgcaacggaggctttttgcaggacatcaaaacgggcctgatcgacctgggacgatgccattgcccttgcgccctcggcctgacggacgcgcgccgagaccgcgccgccctgataaagcggtgcgtcaatattgagctggatctgatcatcccagtacgcgcgattatcagactcatagcgggtgcggccccctttcaggcttaaggtcggccagtgctgagacctggcggtttctacgccgtactgggctgaacgctccatgttctgcgcggccatcaccgttgggatcagtgaataatcaatccggttgagagaatccggctccacggccagacctcccggaaccggtgaatagcgttcagcctgtatgccagttaataccgccagccgcgcgcgggcgctgttcagagaagcattatactgctctaccgtcgcctgcatcccggcgatacgggtgcgggtctgaagctcatcagaggtggagcttacgccagcatcggcgcggagttttgccagctgctcaacgtttttaagtcgcctgcacgttctcttttgtccgnnnnnnnnnnnnnnnnnnnnnnnnnnnnnnnnnnnnnnnnnnnnnnnnnnnnnnnnnnnnnnnnnnnnnnnnnnnnnnnnnnnnnnnnnnnnnnnnnnnnnnnnnnnnnnnnnnnnnnnnnnnnnnnnnnnnnnnnnnnnnnnnnnnnnnnnnnnnnnnnnnnnnnnnnnnnnnnnnnnnnnnnnnnnnnnnnnnnnnnnnnnnnnnnnnnnnnnnnnnnnnnnnnnnnnnnnnnnnnnnnnnnnnnnnnnnnnnnnnnnnnnnnnnnnnnnnnnnnnnnnnnnnnnnnnnnnnnnnnnnnnnnnnnnnnnnnnnnnnnnnnnnnnnnnnnnnnnnnnnnnnnnnnnnnnnnnnnnnnnnnnnnnnnnnnnnnnnnnnnnnnnnnnnnnnnnnnnnnnnnnnnnnnnnnnnnnnnnnnnnnnnnnnnnnnnnnnnnnnnnnnnnnnnnnnnnnnnnnnnnnnnnnnnnnnnnnnnnnnnnnnnnnnnnnnnnnnnnnnnnnnnnnnnnnnnnnnnnnnnnnnnnnnnnnnnnnnnnnnnnnnnnnnnnnnnnnnnnnnnnnnnnnnnnnnnnnnnnnnnnnnnnnnnnnnnnnnnnnnnnnnnnnnnnnnnnnnnnnnnnnnnnnnnnnnnnnnnnnnnnnntgatgctgttattggtcttgccaaaatcgtacaccagctgcgtcaggctcaggccccaggctgcggaatttcgcaacgagccgcttgaatcggtggtctggctgtgacccgtactcccgttcagggctatttgtggcatccagccactgcgcgcttcgtctatttgtgcctggccgatccccagttgcgctgcctgctggctcaccgaggggtcgcgatcgagagcgaaaagaatactttctttcatcgtcattgccgcaacgggagatatccccgcctggccgttatttgcattagccgcagtcaccaccagcgaaattaaggtcagggagacagataatctgagcaacctgttattgcatttcatcttcataatatcccccgactccaggtgatagccaaataaatacccaggaagaggtacaaataatccttcagaaatccctcacctcttctcgattaatttgggtaatagttccccaagcccatttcaattgagatgagagccgttcaatctctttttttcttttaagaatttacttaaatatttattgattcgcagcataacaaaatgtgatatgagcaaccacacccgcaatgttaatgcggtgttacaaataagaaaaaagatggggtttctggacaaaacgttataaaaggcctttcagatgaaacaaataaaccccctgtaatataaagaaaattctaaaatgccccggtgtacatttttgcgttaatttcaccccgaatcagacacaaagattttcaaagaaatgtcaacttaagtaatacaccgaataaaattgaattattttactttaaaaatagaaactaatagatatatgcactaatttataattacaaattagctaaacattctggttagagccaataatccggcagcttaagccaaattttcaagtaaaacatagcgataacaacatacctaaaagatacatacatgtttttgatgactgattaatgcgatatcaataatcacatcattaaactgtttttggataacatcccgcacctgtcgcgattccctttcctgcaaaatgctgtaaactgcgatttattgcgacattttgcaggatactgccccatgcataaaaccgccagacagaaatatgtgcttgatatcattactgagcaaggccaggccagcattaccgagctggcagagcgattgcaggtttcggcggacaccatccgtcgcgatctgaccgacctggaaaaacagggactggcacaaaaaaaccatggcggcgccatcgcgctgaatctctcgacgatgacccgagtaagcaggaatagcttgctccctgaaattaagcagcggctgggtaaacaggttgcgcaatgcgtgcctgcgggctcgacgctttttctggacgccggaagcacactgctggccgttgcctctttccttcaggggccgctgaccatcatcaccccttctcttgatatcgcccagcaggttagcgatcgggaagatattgacctgatcctgctcggtggaaagtgggatcagaaacaacgcctgtttgccggaagcgccaccctttccctgctctctcgctaccgggcggatattgccatccttggcgcatgcgccatccatgccgaactcggattgagcgccagtcaggaggcggatgccgaagtgaagcgtgccatgctggccgcaagccaggcgcactgggtagtcgccgaccatttaaaactcaaccagtgcgaaccgtatctggtgtcagggttatccgagattcatcaactgtttttagatcgtccctgggcagagctcggggaccatagcgccttgcaggttaccgttggcgcgcattaacgtggagaaggtcatgaataaagtgaagacaatgaatattgcgctgatcgggtatggttttgtaggtaagacgttccatgccccgctgatccagtccgtcgaaggcctgaagctggcggtggtctcatcccgggatgaagagaaagtgaaacgcgacctgccggacgtcctcgttgtcgccacgccggaagaggccattcagcacccggatatcgacctggtggttatcgcctcccctaacgcgacccatgcgccgctggccaccctggcgctcaatgccggcaagcatgtggtagtggataagccgtttacgctggatatgcaggaagcgcgggatctgattgcgctggcgcaagaaaaacagcgcctgctctcggtcttccataaccgccgctgggatagcgattttctcggcattaagcaggtgattgagcaaggccgtatcggtaaggtgaaacattttgagtcgcatatcgatcgtttccgtccggaggttcgcgtgcgctggagagagcaaaacgtgcccggcagcggcctgtggttcgacttaggcccgcatatgattgaccagacgctacagctttttggtctgccgcagtcggtacagggcaacatcgccaccctgcgtgacggcgcggagattaacgactgggcgcacgtggtgctgaattatccggaacacaaagtggtcctccattgcagcatgctggtggcgggtggcgttgcccgctttaccgtccacggcgataaggccagcgtggtgaaagcgcacatcgatcagcaggaagcccagctgctggtaggcgtcgttccgggtagcgaaagctggggtgaagacagcgacgctatggtgctgtttaatgcccagggtgaagccagcgctatccctgcgccaaaaggcgaccagcggcagtactatataaacgtgcgcgatgccctgaacggcaagattgacaacccggtccatccggtggaagccctggcggtgatggcggtgctggaagcggcggtaaaatcttcggaaacgggttcaactcaggaactggacttaacggcgcaggagcgcgcgcaactgcaataagccgcaaaaaaatgccctgcgggttagcagggcattatcggttactgacgctttttcggcatcatgcgcagcagcgtgttgtccttccagaagtagtgatgcatcagcgcggcaaaggcgtgcaaaccaatcacgaagtaccccagattcgccagcgttacgtgccactcctttagggtatccaccaggtcaaaattcccctccgccgcatgcggcatcgtcaggccaaacgcaaaccagtcatttccccggttatacatcatcaccatgccgatcagcggcagcgcaatgaacagcaggtagattaccagatgcccgagatgggacagcccggtgatcatcgcttttggtttcggttgaataggcggagccgggaatttgaggcggataagcaggcgcgccaccatcagcaccaggatgctgatcccgcaggaaacgtggatcatattaataagcggacgatcggttcttgggaaccaccctctgaactccatggcgcaataggccataatgactaacagaaaaaccagccagtgaatgctgatttgcagacccgtatattttgtgcgcatgttgtttcccgataaagaatcattatcgcgccaacataaccacctttcctgaaaatgtgaaccccctcgcatggagggggctcctgattacgactgcaaatagaccacctgcgtctgcaaatactcattcagaccgtgtttgccatccgccccgccgataccggatttacgccagcctgcatggaagccctgcatcgcttcaaagttttcacggttaatgtaggtctcgccgaacttaagccccttaatggctttcatcgcgacgttcaggtcctgcgtataaacagacgaggttaaaccgtagtcgctgtcgttggccatgttcagcgcctcttccagggtgtcgaatgccaccactggcagcaccgggccaaaggtctcttcgtgcatgatggccatatcctgacgtacgtccagcagcagcgttgggggataaaaataccctttgccttctgccgctttaccgccaaggaccactttagccccctcctgcaccgcgcgcgccaccttctgctccacgcgctccagcgcggcggcgttgatcagcggccccatggcaatatccgttcgctcagccggattgccaaactggacggctttcattgcctcgcccagacgattaacaaagcggtcgtagatccccttctggacatagacacgttccgcgcagttacacacctgcccggtattgatgacgcgtgaatccacaatggccttcacggccagctcgaggtcagcatcgtccatcacgatcgccggggctttaccgcccagctccagccccactttggtgatgtttttcgccgccgcagccatgatcttttcacctgccccgacgctgccggtcatgctgaccatcgccactttcgggttcccggccagctcctgtccgacggtttcaccccggcccagcacaaggttaaagacgcctttcggcaggccaatctcatcgacgattttggcaaacgcaatggcgttgtttggggtaaattcgctcggcttgataacgatggtgttaccggtgagcagcgcgggagcgagcttacgggcaatcaggaagaaggggaagttccacggcagaatgccggtggtgacgcccagggcacgcttaaacaccagaatattttcgcccggacggtcgctctgaatgatttccccttcataacggcgcgcccactcggccatatagtcgatatagtcagcggtaaagttcacttccacttccgccagctgctggatcttgccgccttcggccacaatcagcgcgctgatttcactgacgcgctcgcggatcccggcggaaattttgcgtagccagctggcgcgttcaatagcaggcagcgcctcccagccagcctgcgcgcgatctgccgcgtcaatggccttgcgggcgtcctcggcgctgccatcgggaatacgggaaatgacctcttccgtggccggattgatcacgtcaatccatgcatcaccctgccaggcaacaaactgtccatcaatatacataggatgttgtacgggtactgtcataacctgctcctgtaatcacactgtttttaacaagtaaacttaatgttaaaaactataattaccggggcaattgcctactctatgagtctgtttttgtgagatatctcataaaagaaacgggtcagcccgtttccaaaatcacaaatcggcaacacaggatgcccgtttgcgtaaaagatggcgcaaacgggcagagcatcacagcagggaacggctcaccagcgcgtcggtgagaatgacgtcgtttcgcaagatctgccacgcggcgtccacgtcggcagggatatcgacatgggcaatgaaatcacgtcccgccggaccgtagccgttgatgtcgtccctgagtcgcggaaattcacccagcaccagcgacaagtagcgctctaccggccataacccctcgaccgggccgctaaacaccagaccgtcgtcgctgttttgcagcacgggcgtcaggccgggatgactcacccatgcgggcgatgcggcctcgtcgcggcatacgcgggcgaacgtagccattgtgcgacgctgcattgtcgggtcctgcaccaccagcacccgggcggcgttcagtccggattgtttcatcaacgcccggctgaagcgggcgttttcgccacagttggtcgactgatcctcaacgtgaagatgctcggccggaatgttccagaattcacgggcgatgtcggccagaatagccgcctcagcacgtccggtggtgggtatcctgttatagcgggggtgtttcgcaatcgcggcgtagaggaaggtcgtcgagtgaccgatcccgccgctgatgatcagaggaacaccctgttcagccgcgattttacaggcagcatcaatcgcggggatcaccgcattacccgccagaatcaccagatcaacgggctggttgtcctgatagtcgtcctgagcaagccacgccccaacggtattcacggcgtcgagggttgtgccaggcagacaggggaaaagtgccattgtcatcgttacctccttacagcatacagagccttcgattatccccctttctgcgcgtcatgctatggcatgaatgctgaaaaaacgggccgggatgtgctcaaaaagcactcacatttgattaacatgagaaaatcgtattcacttgaattatgatttgcgtcagccttagaatcattagcccgctcacaattcaactttttgaaaggtaaaccccgttatgcgcctgccccaacgcgacccttatgctcctcgcgagtggcagccacacgagaaacccgccctgctgggttccccttccaccccggaacatccaacgtcgaaacgaatcgcctatggcgtggtcggcctgctggtgtgtctgaccggggcgctgggtaacgcggtcgtcaccgccaatctgcaaaatctgcaaggcacctttggcgcctggtcgactgaaatcgcctggctccccgccgtctatgtcatgaccaacgtctccatcaacctgctgctggtaaaatttcgccagcagtacggtttgcgcgcctttacggaaggcttcctggtgctgtatgtgctggtcacctttttccacctgtttgtgaacgatctcagctcggcgctgatggtacgggcggcacacgggatggtcgccgccgcgctcagctcgctcggcatttattaccagatacaggcctggcccgcgaagcaccgactgaaggcgctgaccatcggcataaccgggtcgtcgctggcgatcccgctggcgcggctgttctccaccgagctgttacagcttgatgagtggcgcgggctgtacttcttcgagctgggtctggccctgatctccctggcctgcgtgatggtgctcaagctgccgccgggcgatcggcgcaaagtcttcgagaagaaagatttcatcaccttctttttgcttgcgcccggcatggcgctgctgtgcgcggttctgtcgttagggcgtctggactggtggtttgaagcgccgtggatcggctgggcgctggctctctcgctggtgctgattgtctccgcgatcgtgtttgaacataaccgcaacaacccgctgcttaatacccgttggctctccagcggcagcatcgtacgcctggggctgatcatgctgctgatccgcatcgtactggcggagcagaacacgggcgtcatcggctggctgcaatatgtaggcttacagaatgaacagatgacccatctggcgtgggctattttcgccgggatcgtctgcggtatcgtcaccagctgtctgacgattaagcccactaaactggcctggccgattatcacctcgctggcgctgatgatcgttgcctcgctgctggacagccagtccaacaacctgacccggccagatcagcttatattcagccagttcctgctgggcttcggcagcgcgttcttccttgcgcctgcgatgctggccgccattggcggggtgatcgccgatccgcgcaatctggtcagcttttccgtgatgtttggcatgagtcagaaccttgggggcctgctgggttccgcgatcctcggcaccttccagacctggcgcgagaagtaccattccagcctgctggctgaccagctcaccacccttaacccgctggtgaacgaacggattcagctttacacccagatgtacaaaagcctgattggcgacagttccctgctgggaactcaggccattacccagctccagacggtgacggcgcttgaggcaaacatcctggcttacaacgatacttatctcctgacggcgagcattgccactgccacgctggtctggattttatggcgcttgctacgcctgcgcatcaccgcccgtatggcccttaagaacgccactggcaacaagtaatgactatttttcaggagaagttatgagtcagcaggatgccgccaaagagcaggccaacacccgcaaaaatgtgcgcgtcgtttccattttcaccgccgcggctatcggcattgtcggggtactggtgatcctttatgcctggcagctgcccccgtttacgcgtcatgcccagtttaccgataacgcctacgtgcgcggccagaccaccttcatcagtccgcaggtaaacggctacattaccgaggtccatgttcaggatttcgcgcaggttaaaaaaggcgagctgctattgcagatagatgaccgcatctatcgccagcgcgtccatcaggccgaggcgcagctggcaatgaaaattgcagccctgaataacaacctgcaacagcgcaaaagcgcggaagcggtgattgccaaaaacgaggcggcgctgaaaaacgcccgtgcccaaagtctgaaaacccaggcggatttgaaacgcgtgaaagagctgaccgcggacggctccctctccattcgcgagcgcgattcggcgctggccagtgccgcccaggggagcgccgatatcgaccaggcgaaagcaacgcttgagatgtcgcgtcaggatttacaaacggtcatcgtcaatcgcggttcgctggaagcggacgttgagaacgcgaaagccgcgctggagctggcgcagatcgatctgcaaaacacccgcattgtcgcgccgcgtgacggtcagctcgggcagattgcagtgcgtctgggggcgtacgtcaccgccgggacgcaccttaccacgctggtcccgccgcagcactgggtgatcgccaatatcaaagagacgcagctggcgaatttacgcgtcggacagccggtgaaatttaccgtcgatgccttaaacgataaagcctatcagggccgcgtggagagcatatccccggccacaggggtcgagttcagcgctatcaccccggacaacgccacgggcaactttgttaaaatcgcccagcgcatcccggtacgcattgaggtactcggtgagccggaggagtaccggctgctgcgtcctggcatgtcggtgcaggtgaccatcgacacgcgggaggcgaaacaatgacgcttcgcccgatagccggcctgctgataatgactatcctggcgggatgccagtcggtagacgttgagcccgccaaatcgtccctgcacataccggcccagtggcgcgcgacgtcggggccagccagcccgacagagcagctctggtggcgaaattttcacgacagcaatctgaatcgctatgtggatcaggcgctgaagaataacagcgacgtgctgattgcccgcgagcggattaacgagtaccaggcccgggtgtacgctgctgacggcagcctgttcccgtcgcttgacgcgggcgtgaccgggacgcgcgcgcgctcgcagtccgccgccacgggcttccggtatacggtacgttgtacaaaggcagcctgaccgccagctacgacgtggatatctggggcgtaaaccgcagcacctcccgtgccgctgaagcgtcgctggaggcacaaaaggcggcggctgcggcggctgatcttaccgtcgcatcctcggtggcctccgggtacgtcaccctgctgtcgctggacgaacagctgcgcgttacccggtccacgctgaagtcgcgtgaagaggcgttcaacctcgccaagcgacagtttgagacgggatacagctctcgccttgagctgatgcaatcggattctgagctgcgcgccacccgcgcccaggttccactgcttcagcaccagattgcgcagcaggaaaatgcgcttagcctgctgctgggcagcaacccgggtgacgttgcgcgcggtgaaagctttgatgccctgacgccgctgaaactgccctcccagctgccgtcgacgctactgaaccgacgcccggatatcgtccaggctgaacgtcagctgattgcggcggacgcgacgctggcggcatcgcgcgccagcctgctgccgtcgatcaacctcacggccacgggatcggtgcaggatcgcacgctgtcgggattgctggataacccgctacagctctggagcgtgggcggcagtattcttgcgccgctgctgaaccgtcaggcgctgaatgcgcaggtagatatctctcagtcccagcggaatcaggcgctgtatagctacgaaaaaaccgtgcgtaacgcgtttgctgaggtgaatgacagccttgatgccatcacccgctatcaggaacagcttaccgagctgctggcacagcagacggtcgcgcaggagacgctgcggattgcgcaaaaccgctaccgcaacggatactcttcttatctggatgagctcgatgcgcagcgcacgctgttctcggtgcagaccagcgtggtacaggtgaaaaacaacctgctgctggcgcaaattgatttgtataaagcgctgggcggcggctggagcagtgcctgaaaacatgcccggtggcgctgcgcttaccgggcctacatttcgcacccgacgataccctccagggagtcaatctatgcaacaacagtggtgttcagtagatacttacatgatttcttcgcttattcctgaggatgaggttctccagagcgtgcttgaaaacaacaaacgcgccggtttgcccgagcacgatgttgccgctaatcaggggcaactgctggcgctgtttgtccgcatgacacaggcgcgtcgaatactggaaatcggtacgctgggtgcgtatagctcaatctggatggcgcgcgccctgccgccggatggaaagctgattacgcttgaagcggacccgaaacatggcgctgttgcacgccagaacattcacctcgcgggactcagcgatcgtatcgaattgattgaaggcccggcgctaaagtcgctcgagaatttcggtgacgtccctcccttcgacctgatctttattgatgccgataagcctaacaatcccggttacctggagtggtcgctgcactactcccgccccggcacggtcattatcggcgacaacgtggtacgtgacggcgaggtgattaacgggcaaagcgacgatgcacgcgtgcagggagtacggaagtttatcgagatgactggagataacccgcgcttaaccgccactgcgctgcaaacggtgggcattaagggatgggatgggtttacgctggcgatggtgaacgggtgaacaaaagccgggtggcggctacgccttacccggcctacatgttttaccgtaggcccggtaagcgcagcgccaccgggcaacggttttagccggaaatctgctccatcgcctgcaagatacgcttatccgaaatgggatacggcgttcccagctgctgagcgaagaagctgacgcgcagctcctcgatcatccagcggatctcccgcacgtcgtcgtcatcgcgacgcgccggcggcagtttgttgagccactgctgccacgcctgctgcacgttttcgactttcagcatctgcgcacgatcgcgatgcggatcgaccgccattttctccagacgcttctctatcgcctgcaaataacgcagcgtatcgcccagacgcttaaagccattgccggtgacaaagccgcgatacaccagccccgccatctgcgccttgacgtccgacagccccagggccatggtcatatccacccgccccttcaggcgcttattgatattgaacacggcggtaaggatctgctcgacctgtttggcaatctcgaccacggtgtcgttcagctccgcgcgcaccttttcatgaagctgagcaaagccctcttccgtccagaccggaccgcccgccttgtggatcagcttatccacaccgcaggagatgcagtcgtcgatcaggtccagcaccttaccgtacgggttaaagtagagccccagcttggctttgttcggcagcttctcgtgcagatacttaatcggcgacgggatgttaagcagaagcagtcgacgcagcccgcgccacatcatctgctgttgctcctgcggattgtcaaagagcttaatcgccacgctgtcgcgctcatccaccagcgcgggccaggctttcaccttgtagttcccgcgcttctgctcgtagctttccggaagctgaccaaagctccagatgtgcagcccgctctgctcaatgccgtcatcggccaccgcagagagcgtctcctggactttacctttcagcgcctctttcagctccgtcagagaacggccttcgagcagctttttgtttttatcgtccaccacgcggaatgtgattttcaggtgatcgggcacctgatcccagttccagtcgtcgcggtcgatggtggtcccggtcatacggcggaactcacgctccagcgcgtccagcagcggcagctcgagcggcgtgacgcggcctaaaaacgcttcggcgtagttcggcgctggcacaaaattacgccgcaccggtttaggcagggatttgattaatgcaatgaccagctcgcggcgcaggccggggatctgccactcaaacccgctctcttccacctggtttaacagcggcagcggaatgtgcaccgtcacaccatcggcatccgcgcccggctcaaactgataggtcagacgcagcttgaggttgccctgatgccagaagttcgggtaatcgagcttgctgaccgactccgcgccctctttgatcagcatgctcttttcgaagttgagcaggtccggggcctctttgctggctttcttccaccagctgtcgaaatggcgcgccgagatcacatcgtgactgatgcgctgatcgtaaaactcaaacagcgtctcgtcgtccaccagaatgtcgcgacggcgggacttgtgctcaagctcttccacctcggcgcgcagcttcaggttttcgcggaagaacgcatgacgcgtctgccagtcgccttccaccagcgcgtggcggataaacagctcgcgactcaacgccggatcgatctggctgtagttaaccttacgcgcggccaccaccggcaggccgtagacggtgactttttccgtcgccatcaccgcgccctgcccgcgctcccagtgcggctcgctgtatgagcgtttcagcaggtgctgcgccactggttcaacccactccggatcgatacgcgcggcgatacgcccccacagacggctggtttccaccagctcggcgaccatggtccacttcggcggcttcttaaacaaaccggagcccgggaagatggagaaacgcgcgttgcgtgcgccggtatattcctgcttatccgcatccttcatcccgatatgggacagcaggccggtcaacagggcgatatgaatttcgcggtactccgccggttcactgttcaccgggatacccagctctttcaccacctggcgcagctgggtatagatatcctgccactcgcgtacgcgcagatagttgaggaaatccacccggcactgacggcggaactggttcgaggagagcgctttttgctgctcgccaaggtagttccacaggttcacaaaggcgaggaaatcggactctttatcgtggaagcgacggtgtttttcatccgacgcctgctgcttgtccattggacgctcgcgcggatcctgaatggagagcgccgaggtgatgatcatcgcctcgcgcacgcagccgtgtttttgcgcctccagcaccatgcgcgccagacgcgggtcgaccggcaactggctaagctggcggcccaatggcgttagcttgtaggccgtcgcctgttcgtcggtggtgatggcccccagctcttccagcaaccgcaccccgtcctgaatattgcgcttatccggcgcttccacaaacgggaaggcggcgatatcgcccagccccagcgcggtcatttgcaggataacggatgccaggttggtccgcaggatctccggatcggtaaactccgggcgcgacaggaaatcgtcttccgaatagagacgaatacagatcccttccgacacgcggccgcagcgccccttacgctgattagccgacgcctgggaaaccggctcaatcggcaggcgctgaactttggtgcggtagctgtagcggctgatgcgcgccgtacccgggtcgatcacgtatttaatgcccggtacggtcagcgaagtttcggccacgttggtcgccagcacgatgcggcgcccgctgtgcggctggaacacgcggttctgctcgctgttcgacaggcgcgcgtacagcggcaggatctcggtatggcgcagatcgcgcttgctgagcgcatcggcggtatcgcggatctcgcgctcgccgctcatgaagatcagaatgtcgccagaactctcgttgcccagctcgtcgacggcatcaaagatggcctgaagctggtcgcgctcggtatcgtccgcctcttccacaatcgggcgatagcgcacttccaccggatacgtgcgtcctgacacctcgataatcggcgcattgttgaaatgttttgagaagcgctccgggtcgatggtcgcggaggtgatgatgattttcagatccggacgccggggcagcagctctttcaggtagccgagcaggaagtcgatgttcaggctgcgctcgtgcgcttcatcgatgatgatggtgtcgtactgcatcagcagacgatcctgctggatttccgccagcaggataccgtcggtcatcagcttaaccatggtgttatcgctgacgtggtcgctgaatcgcaccttgtagccgatgcagccacccggctccgtttgcagctcttccgcaatacggttcgccacggtgcgcgccgccagacgacgcggctgggtgtgaccgatcagccctttcaccccgcggcccagctccatgcagattttcggcagctgagtggttttacctgaaccggtttcccccgcgacgatcaccacctggtggtcgcgtacggcctcaagaatgtcctgtnnnnnnnnnnnnnnnnnnnnnnnnnnnnnnnnnnnnnnnnnnnnnnnnnnnnnnnnnnnnnnnnnnnnnnnnnnnnnnnnnnnnnnnnnnnnnnnnnnnnnnnnnnnnnnnnnnnnnnnnnnnnnnnnnnnnnnnnnnnnnnnnnnnnnnnnnnnnnnnnnnnnnnnnnnnnnnnnnnnnnnnnnnnnnnnnnnnnnnnnnnnnnnnnnnnnnnnnnnnnnnnnnntcttctggctgacgggcagattttccggataggtaatctccggacgtgcggcttcacgcagcacaactttccctgctgcctgttcaatctcgttggccatctcctggtaaatggcctgttgtgcatcaggatttttaaccttcttaacgccgtgcagacggcgcgcaaaccgctgtttatcgcgcagcatcagcgaatcaagcttttgcatcagcatcgggaaggtcaatttttggtgttctgtcatagcgttaacgggcagtgcactgccggataaaatctctttttaatgattggtatagagtaccacatcagcgcttttcgcgccttattcaaaaaattcgaacataggcttcgatatattgcgctatccctgtggcaggattgtgaataaagtgtcaacaagcaacggggcaaccccctcaatcaaatacaaaacaggaatttcccatgagcaaagtattagtgttgaaatccagtattctggcagggtattcacagtctggtcagctgtctgactatttcgttgaacagtggcgtgaacagcacagcgcggatgaaatcaccgtgcgtgacctggcggcaaacccaattcctgtgctggacggcgagctggttggcgcgctgcgtccgagcgatgcgcctcttaccccgcgtcagcaggaagccctggcgctctccgatgagctgattgctgagttgcaggcgcacgacgttatcgtgatcaacgccccaatgtacaacttcaacattcctacccagctgaagaactacttcgacctggtggcgcgtgctggcgtaaccttccgttacaccgagaacggcccggaaggtctggtgaaaggcaagcgtgcggttgtactgaccagccgcggcggtattcacaaagatacccctaccgacctggtcgcaccgtacctgacgctgttcctgggcttcatcggcattaccgacgtgaacttcgtgttcgctgaaggtatcgcttacggcccggaagtggccaccaaagcgcagaccgacgcgaaagccgctatcgacagcctggtcgctgcctaagttttccccctctcaccgcccggtgggagggtttttcttttcccccgtatttcgttatcatccgcacccactctccagcccggcggcctgatgtctgtcattatagatacgtttattgcaccaccctgtcacgacgacattgagatcctctggcaggacgagcatctgctgctgatcaataaaccttccggtctgctcagcctgtcggggaaaaatccgcaaaacctcgattccgtccaccaccgtcttgttcaaacctttcccggctgcacgctggtgcatcgtcttgattttggcacttcgggtctgatggtcattgcgcgtaacaaagcgatcaacgccgcgctttgccaccagttcagtcagcgcgccgtgaacaaggtttacaccgccctgctgtgcggacatgtggaacaggacgaagggaccgtggatgcgccgattgccaaagatccggcgctgtttccgctgatgacgatctgtgcccgcaccggtaagcccgctcgctcccgctatcgggtggtggaacgtatttaccaggatacgacaatgccgctgacgcgggttgagcttaccccggagaccgggcgcacccaccagctgcgcattcactgccagcagttaggccaccctattctggggtgcgatctgtatggtggtctggaatggccgggggcggaagaaacgccccggctgatgctgcatgcaagcgctctgaattttattcatccgctgagcggcgagacgatgaacgcccgtcacgccgcgccgttctgagcggggattaccacattaaatcgtcagggattttgaagtctgcgtacggatcgtcttcgtcctgctcttcctgactcagggcgctgtttagcacaatgctgtccgcatcgcgctgggcaattttatccgccactaccgccgggataatcgcgtaatcacagtcgccattcgcgttaatcaccagtcgggcaatcgccagacggccgttgatcagctgggtttgcgtctgcttatcgacctcgatttttttgataaggttgccgtcggtaaagttaaaggtaatgttgcccttcgccacggtgatgcggttcatctcaatcagctgcttcacctgcgccctgaactcttttgccagcaccgcctgtttttgctgttcgctcagctgtttatcacgctccagctgggctttcttgttctcttcaacagcctctctcgcctcgcgagcctggacgcgggattttttcgccgtgcgctggaccttcgccatctttttactgctgactaagcccgctttcagcatctgctcttgtagggtgagttttgtcatgttcgtttaaaccggttggaaatgtcgggggattatacctgaatcgcgcagttcatgaagaaccctcatgttgcagtgaaattaagtcacttcccctgcgccagtggctcaggcataaattatgcattgataacgttccggcaacatgaacttaggatgcataaccaaatgagtcaggctttcacatttacccttaagcgcagttgctttgatgaaaattataacccgtcagaaaacacgcgtaccaccaccaacttcgccaacctggcgcgtggcgagaagcgtcaggagaacctgcgcaatacgctggtgatgatcaacaaccgctttaacgcgctggcgagctgggataacccgaaagctgaccgctatgccgtcgagctggagattatttctgtcgatatgaatatcggcggcgattttactttcccggccatcgaaattctgcaaacgacgatcgtggataaaaaaacccacgagcgcatcgaaggcatcgtcggaaataacttctcatcgtatgttcgtgactatgatttcagcgtcctgctgctcgagcataataaagatcggccccgcttcaccctccccgaaaattttggcgagctgcacggcaatatctttaaaagcttcgttcattctgcggaatatcaggcgaacttcaaaaaagcgccggtgatctgcctgagcgtctccagcaaagacacctatcgtcgtaccggtaaccaccacccggtgctgggctatgagtaccagccggacggcgagtcgctaacggaacagtacttcgcgaagatgggcctgaaggttcgctatttcatgccggaaaacagcgtcgcgccttttgccttcttcttcaccggcgatttactgcgtgattacaccaatctggaactgatcggcaccatcagcaccatggagacgttccagaagatctatcgaccagaaatttacaatgccaattccgctgcgggacagtgctatcagcccgacctgaatcagcaggatcactcattaaccaaaatcgtctatgaccgtgaagagcgcagccggctggccattgaacagggtaaatataccgaagagcagtttatcaaaccctataaaacccttcttgagcagtggtctcaacacttcacgctttaatttaatacggataaaaggttcttttatgaaaacattgctcccgacatcaacggctggcagcctgccgaaacccacctggcttgcgcagccggaaacgctctggtcgccgtggaaactccaggacgaggaattactggcagggaaacaggatgcgctgcgtttgtctctggatgaacagattcgcgccgggattgatatcgtcagcgacggggaacaaacccgccagcatttcgtcaccacctttattgaacatctcagcggcgtggattttgagaaccgtcagacggtacgcatccgtaaccgttacgatgcgagcgtgccgaccgtggtagacgcggtggcgcgccagaagccggtgtttgttgacgacgcgaaatacctgcgccagctgactgacaagccgatcaagtgggcgctgcccggcccgatgaccatgatcgacacgctatacgatgcccactataaaagccgcgaaaagctggcctgggagttcgctaaaattctcaatcaggaggcccgcgagctggaagcggccggcgtcgacattattcagttcgacgaacctgcctttaacgtctttttcgacgaggtgaatgactggggtatcgccgcactggagcgcgccactgaagggctgaaatgcgaaaccgcggtacatatctgttacgggtacggcatcaaagccaatacggactggaaaaagacactcggctccgagtggcgccagtatgaagaggcatttccaaagttacagacctcgaagatcgatatcatctcgctggagtgccacaactcgcgcgtgccgatggatctgctggagcttatccgcggtaaaaaagtgatggtcggggcaattgacgtggccacccagaccatcgaaacgccggaagaggtggccgatacgctgcgcaaggcgttgcagtttgttgatgcagacaagctctatccgtccaccaactgcggtatggcccccctttcccgccaggtcgccaacggtaagctgaaggcgttaagcgccggggctgacattatccgtcgcgagcttgcccgctaaccttcaggtttgccagtacagcggcgtaccgaaccgctcaatatagtaatcaatcaccgccctgacgttcaggggcggatgacgcgcgttcgggtaaatcgccgcaatcgtcagtggctccgtattaattgaacactccatttccggcagcagcgccaccagctcaccgcttttgagccgttcgctcaccatccagtccgggaaaagcacaacgcccatgccgcccagcgccgcaatcaggagcgtttccgcgttattggaagtcatcagcggtacaatgggatagtgaacccacgcctcgcccggccgccggatcagccagcggttaggcccggacgagccgcggtaaaccagacagtggtgacggctgagatcgtccggcccctcgggcgcgccatgtttttgtagatagtccggcgaggccgccagatggtagaactgctgcccgaacacccgggcgtgaaacgaggagtccgtcagcgcgccgatgcggaagataacgtccgcggcgtcacggtgcggatcgataaaatcgtcggtgagggtcagttcaatggagagacgagggtaacgcgccagaagccccggcaggcccggcgcgatgtgcctttgtccgaaaaagaccgggccattgatacgcagcgtgcccgacggctcgcgggcgcgttcatccagctcgcgtcgcgcgtcctccatattcccggccatcgcacgggcatagcgcacaaaaagatgcccgctctctgtgggcataatcgcccgcgtgttgcggtagaaaagctgttgcccgagggcgtcctcaagctggtggatcacgcgtgagacctgcgacgcagaaatcccttcccgcctcgccaccacggaaaaattctgcgtttcataaacgtcgatgaagatcagcagcgcgcgaatgctgatatgtccggcatccatcattaatgcatttcctgcaaaggtgtttcctgcattatggcatttttctcaatgatgttcagacgtaatcttctccgcctggaaaaaggagaaaaagcgttatgcacattattttaattttactggtgattgctggtggcatggggctgtccgtggaagccgggctgctggggccgctgggcgcagaggtgggcgacctgtgggcggcgttctgcatattcagcgtgggaacggggctgacgtttctgctgatgctgtttttcagcccgcgcaacagtccctcactttttgcgcagccttcatggcacctgttgggcggcgtgctcggcccggtttacgtcatcattctcaccattgccacgcctgcgatcggcattgccatgacgatgatcggcattctggcaggccaggtttttaaaagcctgattattgaccactatggcctgctgggtacgccgcaccgcaggatcgatacaaaacgcattattgcgctgggatttatcatcgccgcgctcattctcgtggcgcaggggtaacgttatgacagtaattatgattattctggcggtgattggcggcgcaacgctgagcattcaggctgccattaacgggcaattaggcagcagcgtgggggtatttaaaagcgcgtttctgacgttttccgtcggcgcgctggtgaccgccctgctgatcttcttttttgagccgaaacaggcggtcagcctgatggatgtacccaaatggcagcttctgggggccctctgcggcgtgccctatatcgtgattatggtgctcgcagtgcagcgcatcgggaccgccgttgccacggtagcggttatcctgggccagctggccatgagcatgctgattgataactttggctggctgaacaatgaagccattccgttttcagtgagccgtttcggggccgtcgtctgcctgagtattgcgctcttcttcatctactcaagcagtaaacctcagcccgaagaggattaaccgccctctttgcgggtaaagcacagcgtcaccgtggcgacggtgacgccaaatttcttcatctcggttttattaaacagacgggtgctgtcctgcaaatacatccagtcatcaaagtgcagcagccagtctgccgcctgcacggtacaggtgaagacggacaacgtgagcatcagtaccagccagccggggaacatccagctgacgacgataaattcaccaaagggatcgataagcgtggcatcggcgcgataaatccccgccagcgccgaaggtggctgggtatccagcgtggcgtagtaatcaacgaaccgactgatgacggacggcaacgtgctcatgggtcacatcctgggtgttaacaacgtagcggaatcgcataatttaaacttacacaattaactttatttgtccaagtttgcgcagataaattttttattcttattatttttcagttacatggaatatcaccatgcacgaccattttgtgaaaaatatgaatttcgccgccaggctgccgtttttttagggataaccttaaggcaaaggtgccatttatcttccagacttatccttttaattcataaggatgtcacgcgatgaaacatttactgatgacgctcttttccagcccggaatccttgttgcaggtcatgagtcaccaggaaattatcgaagccgtagaggatggcgaccgcatcatcatcgatcaggatggaaacgcctcggttaactacaaaagccacgaagtacggcaggactttctgcgccatgtcaacgcgctgaagagggcctgaaatgggaacggcaatattcatggtattgatggtatgcgggtactggtacaccagccgcgacctctcaacacggtttaaaatcaagcgatcctttggctgggacgtctattttcttgttgcactgtatggctgtatttttgttcttcagggggtgatcgccaccggcctgctgtggctgctgttgttcgccctctccgccgccgataacacgttccatttcacgtcagcaaaatatgccgactggcaaattgattttatgaactggagcttcctggggattcaggccccggtggtggtgatgctgaccttcgcgatcctgttttgtctctaccgatcgaactgggccggaagcgcgcggctggacggcgatggccggaaaaaattgtacaagcggctggcgcagtcgagcgggattgaacaactgctctatcagtgcatggaggaaggtgaactggcgcacgtcacgctgaaatcgcggcggatctatattggcatgatccataccgctacgctggagtatgaaaaaacggccaatatcgtgcttattccgatgctgagcggctaccgtgacgggaagaacatgcagctctgtatcgaacataactacagcaaatggtatgccgagcatgacattacgctcgattcggagcccaaaagcgccatggattttcgcaaagtgatcatgctggatcagatcgagagtatttcgctgttcgatccggcaagcgccagcgcgctggcgatgcgtgaatgaaaaaaatggcgccttatcgtaataaggcgccaggattaaccaggatgaacgctaaacttatggcgtgacaatattgaaccagaagtcaaatgtgtccatgtagctcagcatctcttccagcttcgctccgtctccgctcaccttcacgtcacccttatccatcgcctgcttcagcgtctctttcttaaggatgatgtcgttcagcgtggtgcggtccagggtgatggttgcgtcggcatccttcgcctgcgcgttggcggtatggttcagcacgccgttttccagctccagcttgtatttgccgccatccttaccgagatcgatgttaaagaccgctttcgcgttaccggcccgcaccccgttgatgtgcacgcccaggtagtcgaagaacatttccggggtcatcgcccgcacggtatccgggctggcggtgttcggcgtcggcagcttcttcacgccattacgcagttcctgcgcgccggtcaggtagaagttacgccaggtacccgcttccgcctggtaacctaactgctccagcgcgttggcttccagattacgtgccgcagcgttctgcggatcggcgaagacgattttgctggtcacctgcgccacccagcggtagttgccctgctgatagtcagctttggctttctgcatgatggcatcggcccctcccatgtattccacaaacttcttcgcagcctgttcaggcggcagttcgtcgagggtagccgggttgccgtcgaaccagccgagataaaacacgtaggtggctttgacgtcatggctgacggaaccgtaatagccgcggctcgcccactgtttttccagcgattccggcagtgtaaattcagcggcgatctcgtcgcgggtcagccccttgtttgccatacgcagggtctggtcgttgatgtagcgatacatatcgcgctggcctttcatcagcttgacgatattctcgttgccccaggtcggccagtggtgctgcgcaataatcacttccgcgtccgcgccccagcgctcaatggcggcgttgatgtacttagaccaggccagcggatcgcggattttcgcgccgcgcagggagtaggtgttgtgcagggtatgggtcacgtcctctgcggcttcgatcattttcttctctttgacataccacagcatttcggacggggcttctgagcccggcgccatcataaagtcgtaggtcagcccgtcaatcacttcctgctggccggtatgggtaatgtagttggtcggcgggatcagggtcaccgtacccgcagaggtggtggtgccaagacccgcccccacctggccttttgcatccggcttcagcaggttgccgtacatatagctcgcacggcggctcatcgcattcccggccataatgttttcggaaaccgcttctttcataaagccttccggggcgtagatcttcactttgccggacttcacgtcggcttcgtcaaccacaccgcgcaggccgccgtagtggtcgacgtgactgtgggtgatcaccacagcgacgaccggtttcttgccgcggtttgcatagtagagatccagcgcttctttcgccggttcagcgcttagcagcgggtcgataacggtgatgcccttctcgccttcaatgatggtcatgttggagagatcgagattgcggatctgatacacgccgtcggtgaccttaaacagcccgccaatgttgatcagctgtgactgacgccacaggctcgggtttaccgtatccggggctttttcaccctctttcacgaaatcatatttcgccgggttccagataacattcccctgctcgcctttaatcatgttttgcggcagcggggtgataaagcctttatgggcgttctcaaagtcggttttatcggcaaacggtaatttgttatacagggcgttatttgcctgccgggttgtggcagtggcatcctgcggctgcacttccgcaaacgcggaaagcgacagcgacgtcaacacaccggcaagcgccagatgtttagcaattagggttaatttcattgaatggcctcatagattaattgcgccgcctggatatttactgttggcggataattttaatgcgaactcattgacgaccattctaatcagaatactttctcatcatagtcccatatgggactggttatttatcggttcgtaatccgtgggctattgctgctatactcgttaccacggcagacgttgcggggagaggcttagcgtgaattttcaggatatccatacctattatcagcaactcaatattgggcaattctttccgcacatgctttgtaaaggcgaggccttatccgttgccgcaaataaaaaattcaccgtcgagcctggctatatctatttttgcactgaagggtcgctgacaatattaatgcctgatgatggcctaaatattggcaatactatcgagtatatgccgatagggttaatggaaaggtattgtccactggcgaagtatgaatatcgcagcagtgcaaaggtgaagctggtgagaatagcctgggccgacttcgaccagctatttttcgagggcggatctgagcgcatgcaggcgctggccaccatactgacctacatgtccattttcaccatcgacctgcacaatgaacgcaggcaggtcaccagctaccagaccatcaaaccgatgctgtaccgctatctctatcggcaggagacccacacgggagagaatgagggcctggcgctgtttatcattaagcgcactaacctgtcacgcacgcatgtctttcgcgtgctggcagatcttaaagccgggggctatatcaccatgaagcgcggaaagctggtgtcgattgaccggcccctgccggaagcgtattaagctcatcttcacgccttgagcaacatgcgggaacgaacggcattatttatcccggccagccgacttgggccgtaaattctcatcgaagaccagccgtttacggccgggctcttcttcccgcagcggctccacctgatgcagcgtctgcttacagcgatccaccagtacctgatactcccgcgtgccctgctttttccactctatttcctgcgcgcttaactcacgaatcgctttcgccggactgccaagaattaagtgattcgcaggcatctccgctttggccttcacaaacgccgccgccccgacgatgctgttttcgccgatcgtcgccccgtccatcacgaccgcattcatccccaccagcgcattacggcggataatgcagccgtgcaggatcgcgctgtggccgatatgcccgtcctcttccaccaccgtgtcctgctccggaaaaccgtgcatcacgcagttatcctggatgttcgcgccgtctttcaccacgatccggccaaaatcaccgcgcaggctggcgttagggcccacgtaaacaccttttccgaggatcacgtcgccaatcagcaccgccgtcgggtgaacatagctctcttcaggcacgaccggcgtcagaccatcaatttgataaacaggcataccctctccttatgtgatattcagaccaccaaaacgctggtgataaagcgtgccgggagcgggcagctcgcccacggaggtttcccccttctcactgacaaacgccagggctcccgccgccacgcgctggtagatgttaatacacagctgtcgcgcgctctgtcccgcccagtgcgcaggaagtaactcctccggcaacagcggatctttcagcaccacgcgacgataaaaatgaatgagtaacagctggatctggaagcagcgttccggagtcaaatcctcaggcggcgcctctttcagcagcggcagcagcggacggaacgagttgataaacgtttcgtacatcgcgttttgttcggtcagctgccagcactcttccacgcgggatcgtagcgccgcgcgtgacaaggccagcggcgaatgggcttcaaagaaaatgacgttttccgccacgcccgcgtcatgcagcagagactgcacgtccgccaggttctgcgacggcgaggccatcaggctcggcgcaagcgtgccgaacccttgccagatgagctgttttttcacgtccgcgagcgtggttttatccagcccctcggaaagaagcagcagccatttaccatcccacgccggcagttccgcacggtagattttattttccgcgcggcgggtcaaacgcagccccttgtcgctgagacggtaaaagctgcggcggccaatgcgggacacgtccagccagccctctttgttgaggcgaaacagcgcggtgcgcacaaagcgctccccgaaacccatcccttccagcagggccgccaggctgccgagccagatctctccgccgcgatgggaaagcgcatcgccatacagcgaggagataagcgacgttccgctgacgggaacagagctgaccgcgtgctggataaaggcatcaagtttattcatgcgattcattctgttgttatttttttcctggatgaatcatagcatacgaatctggggtgtaccctcaccctaaacctctctcaaagggaaagggaacttcatacaccctctccctttgggagagggctggggtgagggaaattcaaccgttggctgccactttacgcaaatcaaacacccggcaggctttaccctcggagcgcggtatactgccgcagttcacgatcatcacgtcggtcgagatccccaccatcgatttaatccgatgacgcagctgatggcagacctgacagcgctgttcatgggtcagcgttaagctgctctgtttcagctcgaccttcaccgaaagtgaatcaagatgcccgcggcggttcacctccagctgatagtgcggcgaaaggtgttcgaacttaacgatctcctcttccagctgtgacgggaagacgttaaccccgcgaatgatgagcatgtcgtcgctgcgcccgctgatgcgatccatccggcgcatggtgcgtgcggtgcccggcagcaggcgcgtcagatcgcgggtgcggtagcggatcaccggcagcgcctctttggtcagcgtggtgaacagcagctcaccctgctcgccgtcggccagcggcgtgccgtcattcgggttgacgatctccgggtagaagtgatcttcccagatggtcgggccgtcagcggtttcaagacactccatcgccacgcccggccccatcacttcggagagaccatagatatccagcgcggtaatgcccagccgttttcaatttcgcggcgcatcgcctgcgtccacggctcggcgccaaacacgccgacgcgcagggaacaggcgctggcatcgccgcccatctgacgctccagctcttcaatcaggttcaggcagtaagacggcgtcaccatgatcatatccggctggaaatcgcggatcagctgcgcctgcttctccgtctggccgccggacatcgggatcaccgtcgctcccagacgctcggcaccgtagtgcgcccccagcccgccggtgaagagcccgtaaccgtaggcgacgtgaattttatccttcgcgctgcccccggcggcgcgcagggaacgggcgacgatattggcccagttgtcgatatcattctgggtataccccaccacggtcggctttccggtggtgcccgacgaggcatggatgcgtaccacctgttccatcggcaccgcaaaggtatcaaacgggtagttgtcgcgcagatcctgcttggtggtgcacgggaatttttgcaggtccgccagctcgttgaagtcgtcagggtgaacgcccgcggcatcaaacttgcgtttgtacatcggaacgttgttgtaggcgtggtgcagcgtccacttcaggcgcgcggtctgcaacgcctgcaattcatcaatggacgcggtttcgatcggatcaagctttgttgtatttatcatcgcagggtactcacattattgttcgctcaaacacgctcaaggatcatggcaatgccctgacccacaccgatgcacatcgtacacagcgcgtagcgcccgccgcgtcggtgcaattcattgcttgcggccagcgccagtctggcaccgctcattcccagcggatgacctagcgcgatcgccccgccgttcgggttgacatgctccgcgtcatccggcaagcccagctgacgcagcacgcccagcgcctgtgcggcgaaggcttcgttaagctcaatgacgtccatatcggtgatactgagtccggcacgctccagcaccttgcgggtggcgggcaccgggcctaatcccatcaggcgcggctcgacgcccgcggtcgccatagccacaatgcgggtgcgcggggttaacccctgggcaagcgccatcggctcgctggcgataatcagcgccgccgcgccgtcgttaacgccagaggcgttccccgccgtcaccacaccgttcttacggaacggggctttcagcgcggcaagctgttccagggtggtttcggcgcgcggatgctcgtccacgctcacttccgttaccgcaccttttttcccggccacctgtaccgggataatctcctgcgccagaacgccattctgctgcgcccgcgcggtgcgctgctgactgcgcagggcaaatgcgtcctgatcggcacggcttatatttaacaattccgctacattctctgccgtttccggcatgctgtcagttccgtattgctgatgcatgagcggattcacaaatcgccagccgatggtggtgtcgaagatctccgcctgacgctgaaacgccgccgtggctttgcccatcacgaatggcgcacgggacatggattcgacgccaccggcgatcagcagatcgccatccccggccctgatggcgcgcgccgcaaagccaatggcatccagaccggagccgcacaggcggttaatggtggagccggataccgtctgcggcagcccggccagcagcgccgacatgcgcgccacgttgcggttatcctccccggcctgattcgcgcagccgaagatcacgtcatctatgcgctccagatcgagctgcgggtaacgcgacagcagcgcacgcagcggcacggcacctaagtcatcggcgcgcacgctggataatcctccgccgtagcgaccaaccggggtacgcacaccctcacaaataaatgcgttacgcatcaggcttctcctgtcacactgccgccagtgcggtgcgatttcccgcgaaaaagagcgacggttttctgttgttggttctgaatttcaatgtcgtagacgccggtcagtttgccctgatgcttcacccgcgcggtggcggtgagcttatctccggcaaagcccggacgcagaaaatcgatggcgcagcctgaggccaccgccgccagcccctgactgttgcaggcgtaggcaaaggcggtatcggccagcgagaacagctgtccgccgtggcaggttttatgcccgttgagcatctgcggggtgatggtcatggtcaccaccgcgtagccctcgcccatgtcgataatgtccatccccatcgcctgcgcgcaggcgtcccgttcatacatcgcgcgggcgttatgccaggcgttatgactcatagctactctccagaagcgcacgctggcgcagcagtgaacaggggcgatagcgttcctcgccgtagtgacgttgcagattctccagcagcgttaacagacgctgccagccaaggcgctcgccccaggcgatgggcccgcagggatagttgacccctaagcgcatggcggtatcgatgtcttgctcgctggcgacccctttttgcaaagcgtccagcgcttcgttggcaatcatcgctaccgtgcgccagaccagcaggccggggtaatcggcaatctgtaccacccgtttctcctgatgctgcaaccagtaaatggctttctgcgtggcggcgtgcgggttgcccggtgcggcggctatcacggccacatcccgctcgatgcggtcgaccaccaccaccgggcagccgtggcgcagcgccagcgactgcgcggtttcaccctgcgtttcgatcagcaacagatcgtcaatttccgtgacaccgtcacttcttcgctgtacgcgcatcgggctgaagctgtcgctgaccggggcgagccagctgacggcgggtttctcctccagccagcggtaaacgccctgcccgcttttcttacccagacgccccgccagcaccagctcctgctgcaccagcgacggcagaaaacgacgctcctgccagaaggcgttaaacacggagcaggtcacggcaaagttgacgtcctgaccaatcatgtccgtcagctcaagcggcccccatcgggaagcctccgccgtctcgcagggcggcgtcgatcacctcgggcgttgccacctgctcttccagcgcgcgccaggcttccgagtagaacgggcgcgccacgcggttgacgataaaccccggcgtggactggcagcgtaccggctgctttccccagctcaacgccagctcgcacagtgcatcggccacttcgggagaggtcgccagcccgctgaccacttccaccagcttcatcaccggggcaggattgaagaagtgcagcccggcgacgcgttcagggtggtttatctccgccgcaatcgcggtaacggaaatggacgaggtattgctggcaagcagcgtctgcggcgggcagatctctgccagctgggtaaacagcgctttttttacctcaaaccgctcggaggccgcctcgatcaccagatcggctttcgccagagcactgatagtcgtcaccggcgtaaggcgggcgaggatctgttccccggcgtcggcagagagttttccgcgcgcaacgcgagaggagagccgctgatgaatgccgtcgatggcgcgggaaatcgccgctgcatcaatgtcgtacaccagaaccggatgaccgtggctggctgccacttcggcaataccggcgcccatggtgccgctgccaatgacggcgaccgtatggatattcaccatcttatttccccgtaaagttcggcgcgcgttttgccaggaacgcgctgacgccttcccggtagtcgtcgctgcgtccggccagacgttgatagtcgcgctccagatcaagctgggcgtcgagggtattggtttcggcggcgttgatcgcctgcttgatcaagcccaggccaaaggtcggctgcgaggcaaaatgcagcgccatctgctgtgcggtggcggagagctggtcgtcgtccaccacctgccagatcattccccaggcctgtgcctgctcggcgctgagcttatcgcccagcaatgccagccccatggcgcgggcgcgtccggtcacgcgcggcagcagccaggttccgccgcagtccggtaccagcccgagcttgctgaaggccatcacaaagctggctgaacgggccgcaatcaccatgtcgcagccgagggccagcgtggcccccgcgcccgccgccacgccgttaaccgcgcaaatcaccggcttcggcagttttgccaggcggcgcaccagcgggttgtaaaaagtctcaacggacatgcccagatcgggcgcggggccgttcgggtcgacgctacggtcgttaagatcctgcccggcgcagaaaccacgtcctgccccggtgatcagcaggcagcggatggcgtcatcgcgctcggcctgcttcaggcattcggaaagctgctggtgcatgacgtcgttaaagctgttcaggcgctccgggcggttcagcgtaatggtcattacgccctgctcaacatggctcagaatagattccacaattagcgtcctttaaagtctggggtgcgtttttgtaaaaaggcgttgataccttcccggcgatcgtcggtggccgcgagcaacgcaaacagctgacgctcctgcgccagcccggcctgaagcgggacttcctgcgactggcgaagcgcctgcttcgccgcctgtagcgccagcggcgagtggcgcgccatccgcgccgcctgcttcagggcgtactccagcgtcagcgaggccggatagacgtcgctgaccagcccggcgctgtgcgcctgaaccgccgtgatgctttcgcccgtcagcaccattttgctggccagcgatttacccacgctgcggatcagccgctgggtgccgcctgcgcccggcatgatcccgagggtgatttccggcaggccaaaacgggcgttatcgccagcaatcacgacatcgcagagcagcgccagctcacagcctgcccccagcgcgaagccgttcacggcggcaatcagcggtttggtgaaggcgttgatccgcgcccacagctgcgggcggatatcgttcagggtggcgggcaggtctttctccgccatttcgttgagatcggccccggcggcaaagcagcgttcgttgccgtacaccacgcagacggcgatctcagcatccgcggcggcggcctcaagctgctccgcgatttgcaggagcagcgcattgttgagcgcgttgcgcgccgccggacggttaagcgtcagctgcaacacgcgaccgtgacgggtgacaatcagttcactcatgccatccccttcgcatcaaaatcgacgataacatcggcggttaacggcagcgcctgacagctcagcacatagcctgcggccagctcgtccggctccaggctgtagttggtcgccatatcgacttttccgcgcagcactttgcatttgcaggtggcgcatacgccgcccttgcaggcgtaaggcagatccgccccctgacgcagggccgcgtcaagaatgctctcgtcgtccgccgtcagggtgatctccctgtcgcgcccgtcctgacggacggtgaccttctgcccgtcggcctgcacgctggctgtccgtttaacggcggtacccggcgtgttaaagcgctcaagatggatcgctttttccggcatacccagcgcttgcagcgccgcttcggcctcatccatcatcgccgacgggccgcagatgaaggcttcatcgtactgacggaaattcaccagcgtttttgccagcgcctggagcttttccccgtcaatgcggccatggagcagatcgctgtcgagcgtctcctggctgaagatggcgatcagctgcaaacgctgcgggtatttatctttcaggtccgccagcgcccggcggaacatcatgctctggctgctgcggttgccgtaaatcagggtgaagtggctgtgggcttcagtggccagcgtagcggatataatcgccagcatcggggtgatcccggacccggcggcaatcgccagatagtggccttcgcgttcggcctgcggctggtagccaaaatgtccctggggcaccatcacctccagcgccatgcccggtttgatctcgtcccgggcatagcgggaaaaacgtccgccttcgatggctttgaccgccacgctgatctcaccgcacgcggtgctccggcagatggagtagcagcggcgcagttcctccccaccaggagtggctttcagggtcagatgctgaccgggacggaagcggtacgcctcctgtaacgcctgcggcaccgcgaaggtaatggtcaccgcgtcgcgggtttcaggttccacttttgccactgttaatgaatgaaacgttgtcatggcagcctcaaatacatttgaaatagtcgaagggctcacggcaggtattgcagcgatagagcgctttgcaggccgtagaaccaaattcactgataagcgaggtatcggtgctcgcacagcgcgggcagctcacctccgcgggaacgtgggcatggcagctatggccgacaggcgggctgatgccatattcacgcaggcgccggcgggcatcgtcggtcatccagtcggtggtccaggcgggctccagttgcagcacaatatgtaccgggctaaagccgttttcggtcagggtttcgcggatcgcccccagcagatgctccgttgccggacagcccgaataggttggcgtgaagccgatgacccagccttccccctgcgccttcacgctgcgcaccatgcctaagtcggtgatggtcagcaccggcacttccgggtcggggatctggcttaacagcgcccaaatctgcgggatttgtgcaggcgcgatgtcgacgaggcgttgcatggcgtcctcctttaccactgctggccggggtaaacgcgctggagatactgcatctctgccagcatcggcccgaggtgttcggtatgtagccccttcttgccgcccgtgcgatacgccacctcttcgggcacgcggagggtggcttccgccaggccagcaaacacttcgcgctcccacgggtcccgcaggtcgcgcggatcaaccgccacgccgtcatcaatcagcgccagctcgacgtcgtcggcgtcgaacagttcagccgtaaagcgccacaggctatccaccgcctgttgcattttttgtgcggaggtttctgttccgtcccccagccgcaccagccagccgcggctaaagcgcaggtgatagcgcgcctccttaatggcttttgccgcgatggcggcaagctgactgtcgctgctgtggatcagccgctcgtagagcgccacgttccacgcatccatcagatactgacgggcaatggtgtcggcgaagctgccgtttggctgttccaccagcagcagattgcggaactgacgctcatcgcggccataggccagggtgtcttcatcgcccttaccctcccgttcagcggcgtaggtcaggaaattgcgcgcctgcccgagcagatcaaggccgatattggcgagcgccaggtcaatttccagctccggcgcgtggccgcaccaggcgcccagacgctgtgagagcaccagaccgttgtcgcccagacgcagggcataagcagatacgttgttcatccccaacctcacatatgctcgatgccatcagggatggtgtaaaacgtcggatggcggtagaccttgctttccgccggatcgaaaaactccccgctctcttccggctgggaagcgacgatttcactcgccttcaccacccagatggaacagccttcgctgcggcgggtataggcatcgcgcgcgttttccagcgccatgcggtcgtcggcagcgtgaaggctgcccacatgccggtgcgacagcccctgcttcgaacggacaaaaacttcgtataacggccagtaaacattgctcatggttgattcctcttatgcggcctggcgggcgcgttgtttttccgcgtgggccagagcggcttcacgcacccatgcgccgtcgtcccaggctttacgttttgcggccagacgttcgtggttgcagatcccacgcccgttgatcacctcgtcaaattcctgccagtcgatttcgccgaagcggtagtggccgctctcttcatcgaaatgcaggtcggggtccggcacggtcataccgagcatctccacctgaggcaccgtgttgtccacgaagcgctggcgaagctcatcgttgccaaagcgtttgatcttccaggccaggctgcgggcgctgtttggggagttgtcgtcgttgggtccgaacatcatcagcgcgggccaccagaaacggttgatggcgtcctgcaacatttgccgctgggcttcgctgccctgcgccagcgccatgcaggcctcaaaaccctgacgctggtggaagctctcttctttacagattttcaccatcgcccgggcatacgggccgtaagaggtacggcacagcgccacctgattcacaatggccgccccgtccaccagccagccaatgaccccgatatcggcccagctcagggtcggatagttgaagatggaggagtatttcatcttgccgtcgagcatcttttgatagatgtcctcccgggcgcagcccagcgtttccgccgcgctgtagaggtacaggccgtgtccggcttcgtcctgcaccttcgccagcagaatggctttccggcgcagggtcggcgcgcgggtgatccagttaccttccggcagcatgccgacaatctcagagtgggcgtgctgtccaatctggcggatcagcgtcttgcggtaggcatccggcatccagtcctgcggctcgatggccgtctcctgtgcgatgcgttgctcaaagcgttgttcttgcgtcacataaccacctttgtgattcgttaaatcaccacaaatagcaaaatggtgaatcatttggtttcttaaaagttacacaaaggttaaatataaccccaagaagcgtttgtttattttgtgacgacgctcgcaagccttttcatgaaaggccgatgacacaaggctttcgggtggtcaggttaagcaatacagatcacagcgttaacaattcattaaaactcagcttgatttttatgattcacgatcaaactattgatagtgaaatcacgaaacatctggagataagaaatgcagcagttagccagcttcttgtccggcacctggcaatcgggccggggccgcgagcgcaccatcacccacgccatcagcggggaaacgctatatgaagtgaccagcgaagggctggatatggcggccgcgcgccgttacgccattgaacacggcggagaagcgctccgcgcaatgagctttatcgagcgcgccgccatgctgaaggcggtggccaaacatctgctgagccagaaggatcggttttatgccctgtcagcccagaccggcgcgacgaaggccgacagctgggtggatattgaaggcggtatcggcaccctcttcacctacgcaagcctcggcagccgtgagttgccggacgataccctgtggccggaggatgagctgatcccgctgtcgaaggaaggcggctttgcggcacgtcacgtgttaacgtcgaaatccggcgtggcggtgcatatcaacgcgttcaacttcccgtgctgggggatgctggaaaagctcgcgcccacctggcttgccgggatgcccgccatcatcaagcccgccaccgccaccgcgcaggtgactcaggcgatggtgaaagcgatcgtcnnnnnnnnnnnnnnnnnnnnnnnnnnnnnnnnnnnnnnnnnnnnnnnnnnnnnnnnnnnnnnnnnnnnnnnnnnnnnnnnnnnnnnnnnnnnnnnnnnnnnnnnnnnnnnnnnnnnnnnnnnnnnnnnnnnnnnnnnnnnnnnnnnnnnnnnnnnnnnnnnnnnnnnnnnnnnnnnnnnnnnnnnnnnnnnnnnnnnnnnnnnnnnnnnnnnnnnnnnnnnnnnnnnnnnnnnnnnnnnnnnnnnnnnnnnnnnnnnnnnnnnnnnnnnnnnnnnnnnnnnnnnnnnnnnnnnnnnnnnnnnnnnnnnnnnnnnnnnnnnnnnnnnnnnnnnnnnnnnnnnnnnnnnnnnnnnnnnnnnnnnnnnnnnnnnnnnnnnnnnnnnnnnnnnnnnnnnatcgtcgagagcggactggtgccggacggcgccatcagcctgatctgcggtggcgcgggcgatctactgaaccagctcgacagccaggacgtggtgacgtttaccgggtcggccagcaccgggcagagcctgcgcgtccacccgaatatcgtcgcgcattccattccgtttaccatggaagcggattcccttaactgctgcgtgctgggtgaggacgtgacgccggaacacccggagtttgcgctgtttatccgcgaagtggtgcgcgagatgaccgccaaagccgggcaaaaatgtaccgccatccgccgcatcatcgtgccggaagcgcagattgacgccgtcagccaggcgctgattgcgcggctggagaaagtggtcgtcggcgatccggcccaggaaggggtgaagatgggggctctcgtcaacggtgagcaacgtgctgacgtgcaggaaaaagtcgatcatctgcttgccgcgggctgccagatccgtctgggtggtaaagccgatttgcaggcggctggcgcattcttcccgcccaccctgctgttctgcccgcagccggacgaaaccccggccgttcacgccaccgaagcctttggccccgtcgcaaccctgatgccgtaccgcaacaccgaacacgccatgcagctggcgcgggcgggcggcggcagcctggcgggaacgctggttacggcagatacccgcgtggcgcggcagtttattgccggggccgcgcgcgcccacggacgtattcagatcctcaaccaggaatcctcgaaagaatctaccggccacggttcaccgctgccgcagctggtgcacggtggtccgggacgtgcgggcggcggcgaagagctgggcggcctgcgcgcggtgaagcactatcttcagcgcacggccattcagggcagcccgtccatgctcgccgcgatcggtaaacagtgggtccgtggcgcggaggtgcaggaagatcgcgttcatccgttccgtaaatacttcgaggagttacagccgggcgacagcctgctgaccccgcgtcgtaccctgacggaagcggatatcgtgaattttgcctgcctgagcggagatcatttctacgctcatatggacaaaattggcgcggcggagtcgatttttggtgagcgcgtggtacacggttatttcctgatttccgccgcggcggggctgtttgtcgatgccggggttgggccggttattgccaactacggcatggaaaacctgcgctttatcgagccggttaagccgggtgataccattcaggtgcgcctgacctgtaaacgtaaaacgctgaagaaacagcgcactgccgaggaaaaacccaccggcgtggtggaatgggcggtggagatcttcaaccagcaccagcaggccgtggcgctctactccatcctgacgctggtggcgcgccagcagggtgacttctgacacacctctttcttgccgggtgtcgctccgcttacccggcctacaactacctgaccggggtgtgatatcccccggtctttttttaacctggcaagactgacaaacaacctggcagatgcaggcaaacgcttttcgtgcgcgcctgtcaggataaggctgacacaacacaataaacacaacaagatgaggtctgcgatgggaagcaattcttctttttctgcccgtagaacggcactggccatggccgttgcgctctgttgcgcctggcaatcccctgtttacgctcacggcagcgaggcgcatatggtcccgatggacaaaacgcttcaggcgtttggcgcggacgtgcagtgggatgattacgcccagatgttcaccatcgtcaaagacggtgcctttgtgaaggtcaaacccggcgcaaacaccgccatcgttaacggcaaaccgctgacgctccaggtgcccgtggtgatgaagaacaataaggcctatatcccggagacctttatcaacgatgtctttcagtccggtcttgatcagacattccaggttgaaaaaagcccccacccgttaaacgcgctgacggctgatgaaatcaaccaggccgtagccatcgtgaaagcctcagcggattttaaacccaatacccgctttacccagattgcgctggcggagccagaaaaagccaaagtctgggacttcgtccttaacggcacggcggtggatgcgccccgccaggccaatatcatcatgcttgatggtaaacacatcatcgaaagccgggtggatctgaaggagaaaaagatcctccgctgggagccgatcaaagacgcgcacggcatggtgctgctggatgacttcaataccgtgcagcagatcatcaatgaaagcccggagtttgccgccgtgctgaaaaagcgcggcattaccgacccgaagaaagtgatcaccaccccgcttaccgtcggcttttttgacggcaaggatgggctgaaacaggaagaccgcctgctgaaagtgatcagctatctcgacgtgggcgacggtaactactgggcgcacccgatcgaaaacctggttgcggtggtggatctcgagcagaagaaaatccagaagattgaggaaggcccggtcgtgccggtgccgctcacgccgcgcccgtatgatggccgcgaccgcgttgaaacggtgaaaaaaccgctggagattatcgagccggaaggcaagaactacaccatcaccggggacagggtgcactggcagaactgggattttcatctgagcatggactcacgcgtcggcccgataatttccaccgtgacctataacgacaacggcaaaaagcgacaggtgatgtatcagggatcgctcggcggcatgattgtgccgtacggcgacccggatatcggctggtactttaaggcctacctggactccggcgactacggcatggggaccctgacctccccgctggtgcgcggcaaggatgttccgtctaacgccgtaatgctcaacgaaaccatcccggattacaccggcgcaccaatggagatcccccgggcgatcgccattttcgagcgttacgccgggcctgaatataagcatcaggagttaggtaaacccaacgtcagcaccgaacgccgcgagctggtggtgcgctgggtcagcaccgtgggtaactacgattacatcttcgactgggtattccacgaaaacggcaccatcggcattgatgcaggggctacgggcattgaagcggtgaaaggcgtgcagacgaaaaccatgcatgatgccaccgcgaaggatgacacccgatacggaacgctgatcgaccataatattgtcggtaccacccaccagcacatctacaacttccgtctggatatggacgtggacggcatcaacaacaagctggtggccatggatccggacgtcaaaccgaacaccgctggcggaccgcgcaccagcaccatgcaggtgaatcagtatgatattgataccgaacagcaggcggcgcagaagtttgacccgggcaccatccgcctgctgagcaacaccagcaaagagaaccgcatgggcaacccggtctcgtatnnnnnnnnnnnnnnnnnnnnnnnnnnnnnnnnnnnnnnnnnnnnnnnnnnnnnnnnnnnnnnnnnnnnnnnnnnnnnnnnnnnnnnnnnnnnnnnnnnnnnnnnnnnnnnnnnnnnnnnnnnnnnnnnnnnnnnnnnnnnnnnnnnnnnnnnnnnnnnnnnnnnnnnnnnnnnnnnnnnnnnnnnnnnnnnnnnnnnnnnnnnnnnnnnnnnnnnnnnnnnnnnnnnnnnnnnnnnnnnnnnnnnnnnnnnnnnnnnnnnnnnnnnnnnnnnnnnnnnnnnnnnnnnnnnnnnnnnnnnnnnnnnnnnnnnnnnnnnnnnnnnnnnnnnnnnnnnnnnnnnnnnnnnnnnnnnnnnnnnnnnnnnnnnnnnnnnnnnnnnnnnnnnnnnnnnnnnnnnnnnnnnnnnnnnnnnnnnnnnnnnnnnnnnnnnnnnnnnnnnnnnnnnnnnnnnnnnnnnnnnnnnnnnnnnnnnnnnnnnnnnnnnnnnnnnnnnnnnnnnnnnnnnnnnnnnnnnnnnnnnnnnnnnnnnnnnnnnnnnnnnnnnnnnnnnnnnnnnnnnnnnnnnnnnnnnnnnnnnnnnnnnnnnnnnnnnnnnnnnnnnnnnnnnnnnnnnnnnnnnnnnnnnnnnnnnnnnnnnnnnnnnnnnnnnnnnnnnnnnnnnnnnnnnnnnnnnnnnnnnnnnnnnnnnnnnnnnnnnnnnnnnnnnnnnnnnnnnnnnnnnnnnnnnnnnnnnnnnnnnnnnnnnnnnnnnnnnnnnnnnnnnnnnnnnnnnnnnnnnnnnnnnnnnnnnnnnnnnnnnnnnnnnnnnnnnnnnnnnnnnnnnnnnnnnnnnnnnnnnnnnnnnnnnnnnnnnnnnnnnnnnnnnnnnnnnnnnnnnnnnnnnnnnnnnnnnnnnnnnnnnnnnnnnnnnnnnnnnnnnnnnnnnnnnnnnnnnnnnnnnnnnnnnnnnnnnnnnnnnnnnnnnnnnnnnnnnnnnnnnnnnnnnnnnnnnnnnnnnnnnnnnnnnnnnnnnnnnnnnnnnnnnnnnnnnnnnnnnnnnnnnnnnnnnnnnnnnnnnnnnnnnnnnnnnnnnnnnnnnnnnnnnnnnnnnnnnnnnnnnnnnnnnnnnnnnnnnnnnnnnnnnnnnnnnnnnnnnnnnnnnnnnnnnnnnnnnnnnnnnnnnnnnnnnnnnnnnnnnnnnnnnnnnnnnnnnnnnnnnnnnnnnnnnnnnnnnnnnnnnnnnnnnnnnnnnnnnnnnnnnnnnnnnnnnnnnnnnnnnnnnnnnnnnnnnnnnnnnnnnnnnnnnnnnnnnnnnnnnnnnnnnnnnnnnnnnnnnnnnnnnnnnnnnnnnnnnnnnnnnnnnnnnnnnnnnnnnnnnnnnnnnnnnnnnnnnnnnnnnnnnnnnnnnnnnnnnnnnnnnnnnnnnnnnnnnnnnnnnnnnnnnnnnnnnnnnnnnnnnnnnnnnnnnnnnnnnnnnnnnnnnnnnnnnnnnnnnnnnnnnnnnnnnnnnnnnnntgggtggctcaggtggtcagcaaagtggtctttgccgatccaaataatcaggccgcgcgaaacctggaagcggatgcgctggagcagctgggttatcaggctgaatcaggcccgtggcgtaacttctacctgaccggcgcccaggagctgcgtaacggcgcggtgaaaggaccgaccccgaacaccgccagcccggataccgtgcgcgcgatgacgccagaaatgttctttgactatctggcggtgcacattaacggtgaaaaagcggcggatgcaaaatcggtgtttaacatcgacctcggcagcgacggcggcaaatacaagctggagctggaaaatggcgtgctgaaccacacggcgaacgccgaagcgaaagacgctgacgcgaccgtgaccctcaaccgcgatacgctgaataaaatcatcctgaaagaagtgacgcttaaacaggcgcaggataacggcgatatcaaagtgaccggcgatgccgcaaaacttgatgccatgctcggttacatggataaatttgaattctggtttaacattgtgaccccgtaaaggcagcactcgcgggcggacgttccgcccgctcaaggaaaattctcttcaatggaaaaaagacatccagccacacccgaacccgcgatatggcctacccgtaaatcaatggttgttcacgggctggccgtgaacctgccgtggctcgcctttgtgaatgccagctttgcccttatggtcctgctgcgcaattcgttgttcggccatatcgatgccctcctgcacatcagcccccctctgcggcagatgattgacgcctccatgctgggcgtggtgatcctttccgtggcgctggtgatcatggcctggcgacacatccgcggcgtcagcgctgttttgtttatgtgcagcctgctgtggtcgataagctgttactggtttatcaacgtgttacagcttcctcatccctggcctatattcgttaccctgctgatggccggtatgaccgcgctctattttcacccggttgcactgctctgcttcaccgttccgctatgggtaagcctgcccgttgccagcatgctgctgaatcaggaaattaattatcgctttgccgggctgtgggtggtgttcacgttcattctcgtgtgcgggcgctatatcctgttgagctggtttgaagaggcgtggcgtcgcaaccagcagaatcagcgtttaatttcacggctggatgcgctggcccatcaggatccgctgacgaaaacggccaaccgccgggcgatggagttggtgctggaaaacgccgtggagcaaggcaaacgcttcgcggtgctgatgctggatgtcgattacttcaaactgtataacgatacctacggtcaccaggccggagatgcgtgcctcgcgcgggtggcagaggtgctgaacacctcggtgcgcacgccagaggatgtggtttcgcgctacggtggcgaggagtttgtggtgatcctctttgactgcgaagaaagcgttgctgagaaagtcgccgcgcggatccaggctggcctgcgcaacgcagccattccgcacagcgcgtcgaaggtgagtgaatatgtgacggcgagtatgggcattgcaggctataccgcagggctggccggcccggaaatcatcgcccgcgccgatgcggcgctgtacagggctaaggaggccgggcggaatcggtggtcgctgtaagttacgccgggtggcgctgcgcttacccggcctacaaaaccaacctttttcctccatcccgtaggccgggtaaggcgtagccgccacccggcgtttttttaataccgcacacacaccgacttggtttcacaccagccgtccagccagtcggggccgaaatcgcgcccggtgccggactgcttcatgccgccgaacggcaggttggcgtctatcagcgtgtggctgttcacccacactgttccggcctgtaacctgtcggtatacgccagcgctttactgatgttctgcgtccagacgctggccgttaagccatattcagtgtcattcgccagctgaagcgcctcttccccatcggccacacgaaccaggttcaccaccggcccgaagacctcttcacgcgtcagtcgcagatgattatccgggttgaccaccagcgttggcgaaacgtaatagcctttgccgtctggcccccggttcccggcgatcagctccgcatggtgcgccttcgcctcatccaggaacgcctgaaccttatcgcagtgggcgcgcgacaccagcgggttgataaacgcctccggcgacatgcccggcccgacgctgagggatttcacggcctgttcaaacccgctgaccagcgtgtcgaacagcggagccttaatataaatgcgcgnnnnnnnnnnnnnnnnnnnnnnnnnnnnnnnnnnnnnnnnnnnnnnnnnnnnnnnnnnnnnnnnnnnnnnnnnnnnnnnnnnnnnnnnnnnnnnnnnnnnnnnnnnnnnnnnnnnnnnnnnnnnnnnnnnnnnnnnnnnnnnnnnnnnnnnnnnnnnnnnnnnnnnnnnnnnnnnnnnnnnnnnnnnnnnnnnnnnnnnnnnnnnnnnnnnnnnnnnnnnnnnnnnnnnnnnnnnnnnnnnnnnnnnnnnnnnnnnnnnnnnnnnnnnnnnnnnnnnnnnnnnnnnnnnnnnnnnnnnnnnnnnnnnnnnnnnnnnnnnnnnnnnnnnnnnnnnnnnnnnnnnnnnnnnnnnnnnnnnnnnnnnnnnnnnnnnnnnnnnnnnnnnnnnnnnnnnnnnnnnnnnnnnnnnnnnnnnnnnnnnnnnnnnnnnnnnnnnnnnnnnnnnnnnnnnnnnnnnnnnnnnnnnnnnnnnnnnnnnnnnnnnnnnnnnnnnnnnnnnnnnnnnnnnnnnnnnnnnnnnnnnnnnnnnnnnnnnnnnnnnnnnnnnnnnnnnnnnnnnnnnnnnnnnnnnnnnnnnnnnnnnnnnnnnnnnnnnnnnnnnnnnnnnnnnnnaatcacccacgccgggtcggcatctttcagcacgatggccgggtttttgccgcccagctccagcgtcacgcccgttagcgtgtccgccgccgcgcgggcaatctgcttgcccgtcgccgtcgaaccggtaaagctcactttggcaatgcgcgggtgcgaggtcagcgccgcgccacagacggcgccactgccggtcaccacgttgaacacaccctccgggatccccgcctcgctcgccagttccgccacccgtaacagggtgagcggcgtggtttccgacggtttgatcacgatggagcaacctgccgccagcgcgggcatcactttccacatgccaatcatcagcgggaagttccacggcacaatccccgccacgactcccgccggctctttacgcgtccacgcctgataacgcgcgccctgcggcagtggaatcgagagatcgagggttttaccggcaattttggtggtcagccctgccgtgtagcgcatccagttcagggtgcagcccacctcgaaggcgcgggaaatgttaatcgatttcccctgctccagggtttcgagctgtgccagctcttcgccatgctgttccaccagatccgcaaaccgcagcaggatgcgttcccgctctgccggcagccgcccggcccagcttcgggcgacaaaggcgcgccagccagacatcaccgcacgatcgacatcatcgacgctggcatcggcggtagaggcaataacctctccggtcgccgggttgtagacgttcagacgcttttcgctatcggatgccgcctgacgcccttcgatccacaggccgtgctggcgatctaaaaactgctgcacgcccggcaggatggcgacgtgtgattcggacataggatactccttcgttatgcttcgcagggtgtgtatgcagtctaagaggggattcgcattcctgcttttgtctgtgtgacattcgctttgccagctgtgacagggtccgcaaatcgtgataattcccgcttatatcgctgtaaccgttgagtgttctttcctatagtcagcctcgtagccctgacaaaatgcaacataaatgcaacaatgcgaaaacagtgacggtgcagcgagaacatcaatggcgtgtgcaagcgaacaagacaattttcagcagtggctggcgcaaattaaccaggtttgtgggcgctttgcggcacgtccgttagagggggcgtttctcggcgagctggaaaccagctacacccaaagtctgaagctgagcacggtgaccgccgcaggcgttaacctgtttcgcacccgtcaggagatcaaaaacggcaacgatgcctggttctacaccgtgtttcagctggaaggcagcgccggaatcgaacaggacgaccagcgcgcgatgctgaaagccggggatatcacgctgattgacgcctcccgcccgtgctccatttactggcaggagcgttcccgccagatttcgctgctgctcccgcgacaaatcattgagcaacacgcgcgttttcaggaagtgaggtgcgcgctgcccctctcccgcagtctgcctaccgtacagctgagctaccgtctgttgcaggagagcatgggcaatgccgatctcagcgccagtgaaagcgaagcggcgctggaggcgatggtgtgtctgctgcgtccggccttccagcagcgtgacgaggtgctgccgcgcaaggagcgtcagttccgccacgttctgtccctgattgatgatcatattcagtcggaggcgttaagaccggagtggatagcttcagagagcggcatgtccgtgcgtagcttgtaccgcatgtttgccgggaaagggctggtggtagcgcagtatattaagaaccgtcgcctcgatttatgcgctcaggcgctgcgttccatcagcgatgacgaaaagctggcggggattggctacagctggggtttcaccgaccatagccatttttccaccgcctttaagcagcgtttcggggtttcgccgggcgaataccgcaggcgttatcgctagctattttttcagccacttgccgttaattcccttcacgtactcacccggctgcgcgcgggccaccagcttttgtcccgccattttcgccacctcgtcgacgggtaaattattactgtcagccagctgctggtaactttccgtgcgtgcggcgttgatacggttcaccagcgccagggtttcagcgtcgtgctgaacgggcgcaagatagccgctcagggtttcccctacgcgcccctgggcacgcgcatcgttgagcgtaagcgtggcggcgtgaacgttcatccccagcgccagtaacatcagagctaatcgtttcatgacatcctcagaacagatcgctgcgggatttcagcagggcttcaacgtctttatccaccttgatatggatttcatgctcgattttcacgttcatgttgatggtgatcggctctttgggcgccgccacttcaatgcgcggcgtgcagcctgacagcagcgcgacgacggccacggtgagtacaccagccctctttttcattgttgttcctcactttccttgcctgtcgaaccgcggagaaggggtatcgccgcatgttgctcaaaccatgtttgcagattgtccccaaagcgcaggctgcgccagagggtaaaaatgttctcttcatgggtgtaattcaggtttacgaaactgcttttgccttcgacgcggctggtgcctttaatggccgcctgcatggttaacacacccagattatccacattgagttttgtccacgactgcgaaatttccatatagcggagccagttgatcgccgccccggcaaccatgttgtctttcacaatggcatccgccgtgtcctggtcgatgcgcagcgtcatcggccccgggttggtcagccagccatctttaatgatccatttttcattgtccagccagaacggcagcgcgccgctcaccgggccggacatggcaaactgcttcggattcaccgcgcttatcagttcgctggaggaaatattatccacgcgcagtaaagccggatcgtgctgcggcattctcaactgctgcatggtgattttcccgccgagcgcttccaccttcacgttggtgagcaggagcgggttcgcttcggtccagggataatcgccctggagatccgcggtgatatttcgggctgtgaccaggtttttcacctcgtcgattcgtaacgttaccggcccgcgcgtgcccagcgaccaggtaccctggcttaagcggaacggaagaacaaaatccacgccgttgatctcgttatccggcatccacgcgctgcccgctttcagcaccccgtgccccccggcctcaaacccctgatcgggggccgcggagaaagccacctgcgcgtacatttcgccgccgcgcagggtcattttccagtctggcgggatcagcggctgaaacaccgtaagagactgttttggccaccaggcctgaccgcgaaggcgttcgccgtcccagcgtccattcacctggaccgggccgatgtcatccgcatgcaggttccctttaaactggaacaccgtcgggtctgtcccgtcaacgctgaaggtcaaaacggacggcggcagcacgcttccgcctgaaaagcttgtttgcccggcgttaagcgcgagcgcaccgctaaaggtggggttatccgggtcccgcgaccagcgcaccgggtgatccagcaccaggcgcggcttgctgaccagcatcgtaccgtactgcaatttgtcgaaccccgtggaaagatcggtcagttcgataacgttgtcgcgccactccccggttccccggacatcccagcgcgcgttcattggcgtgaaattccctttaccccagtagcgccactgccacaaaccgttgtccggtaaaaagtcgttagcctggccgtccagatgcagctcaaaatcgcccatctcgttttcatgcgcccgcagaatggcttgcaggcggccgtccacgcccttctgcgtgagcttcacgcccgccagcggccagcggatctcatcgatatccagcgagtcgatgatgcgcccgcgcgagcgcaataaagcgccgggttcaaacgtaagctgcggatcgtaaaggctgccggtcagcatcgccgggagcctggcatacaggatcagatcgttttgcttggcttccccgctcaggtgcagcggcatagcgctgttatccatactgagcgagccgggaccgatattcagcaccgcgttgcccttacccgcatccccctgggtcagcacgttgagccgccccgtgaaggtggctttctccagcccctgctgccagttatccactttcagcccgacgcgtccgctcattggcacgccggaggctaaccagttccagcgtccgtcgctgatggtcaactgctgagcggtgatctgccacggtaaatcgagcagcggatcggggttgtcccgcgccatgaccaccagctggccctgattgtcctcccagtccagatcggcatcgaccagcgaggataactgtggcacgttaaaggtcgcgaccgtatgccctttcaccggcacgccgtccggcaccagcggcagggtaaattcaccgaccagcttcacgggctgcggctgatccggcagttgcacatcgaactggctgatggagagggtctggccgtgcaactgccccttaatgctcacctgcttgccgttataggtgatgtcctggcgggctggcgtcagtgaggcatgcagctcaccctcccactgctgccagggagaaagggtaaagcgatggatggtcagccaggtgttgggcaggatggcctgccactgcgccagcgttttcggcgccaccgtagatggcgccgattgcggtaatttgctcaggcagacagagttaagttcaagtgcgccaatatccagatcccagcggctggggtgtgacagagtcacgttttccacgcgggcaatttcacactcttctaccagatagcggagatcggggatgatcagggcgtgacgcgtgagccgtgggcttttttcaaacgcgatgcgcgttccaacggggagccagatcccggcgagcgtgggtacccactgggcgagcgtcatcagcagcgtcagcggcacaagaaatagcagcagtgatagcgcgattgcggctttgtatttacccttcatgggcagttaatatcctgattttgcgaaaaaaataagccgttcttgccgctcattgtcgcatgtttagccagtcagttgaaggtaatgccatttttaagagtagatgctctacaataattcatagaacttattgatttcaatgaattttgaaaaattgtaagataattttaaacatgctaacgtggttccaaaatcactggagaaagtcttatgaaactcgcggtatatagcacaaagcagtacgacaaaaagtatctgcaacatgttaacgagacgtacggtttcgatcttgaatttttcgactttctgctaactgaaaagacggctaaaaccgcccacggctgcgaaggcgtgtgtatcttcgttaacgacgacggtagccgaccggtgctggaagagttaaaaaaacagggcgtgaaatacattgccctgcgctgcgcgggctttaacaacgtcgatctcgatgccgccaaagagctgggtctgaaggtcgttcgcgtcccggcctattctccggaagccgtggcagaacatgcggtcgggatgatgatgtcgctcaaccgtcgtattcaccgtgcctatcagcgaacccgtgatgctaacttctctctggaagggctgaccggctttaccatgtacggtaaaaccgcaggcgtgatcggtaccggcaaaattggcgtggccgcccttcgcatcctgaaaggatttggcatgcgcctgctggcgtttgatccgtacccaagcgccgctgcgctggagctgggcgtggagtatgtcgatttgaaaacgctcttctcgcagtctgacgttatctccctgcactgtccgctgaccccggagaactatcatctgcttaaccagtcggcgttcgaccagatgaaagacggcgtgatgatcatcaataccagccgcggcgggctgatcgactctcaggcggctatcgaagcgttgaaaacgcaaaaaatcggcgcgttgggtatggatgtgtatgagaacgaacgcgatctgttctttgaggataaatctaatgacgtgatccaggacgacgtgttccgtcgcctgtctgcctgtcacaacgtgttgttcaccggacaccaggcgttcctgaccgccgaagcgctgatcagcatttcggaaaccacgctggggaatttgcgtcaactcgaaaacgggcgaggcgtgcccgaacgnnnnnnnnnnnnnnnnnnnnnnnnnnnnnnnnnnnnnnnnnnnnnnnnnnnnnnnnnnnnnnnnnnnnnnnnnnnnnnnnnnnnnnnnnnnnnnnnnnnnnnnnnnnnnnnnnnnnnnnnnnnnnnnnnnnnnnnnnnnnnnnnnnnnnnnnnnnnnnnnnnnnnnnnnnnnnnnnnnnnnnnnnnnnnnnnnnnnnnnnnnnnnnnnnnnnnnnnnnnnnnnnnnnnnnnnnnnnnnnnnnnnnnnnnnnnnnnnnnnnnnnnnnnnnnnnnnnnnnnnnnnnnnnnnnnnnnnnnnnnnnnnnnnnnnnnnnnnnnnnnnnnnnnnnnnnnnnnnnnnnnnnnnnnnnnnnnnnnnnnnnnnnnnnnnnnnnnnnnnnnnnnnnnnnnnnnnnnnnnnnnnnnnnnnnnnnnnnnnnnnnntaagccgggtggcggctacgccctgcccggcctgtggattgcgttaattgtaggcccggtaagcgcagcgtcaccgggctttttggcttcaatcctgccacgcgcaggaaagtcttagctgacgtttgccgttctgctttatccagtgacccgaaaacaggtaataattttgattaaataagtttgatttttacctcatacccctcgaggcctgtcatggcttcacgagcgataaactcaatttcagacacttcctgccctgtttttttacgtaactctgaaatttttttggttataagcgctgaaatttcttcttctgccttttgcgtcagtgcgtcaacgttcatgtttacctcttgcaaccgtttactgtttccattctccagcaggcgacagctaacgattaactgcctttaaccataactgtatgtaaagagtagactatctgtgtaacgtatgctgccgtcgcatttaaatatgcatttagattgcattatttaaacaaggtgttattgtcccaaagccttagagcacaaaaaagataaatataagaaaagctttgactcacactcgccccgcatcaggggcatttttttggctgtttgtaggcaaaaacccgccattagcgggtttttgtgttattcgagaaaattatttaaagacttctgcaacggcctggaagttagggccatgctcgcgggcagcaatgatgacgtagtatttcccgcccttctcgtctgccagttttgagagtttttgatgaagatctgaaggtgaagaaatttgtccacctgaagcccctacagatacattaccaaggtattcaagcttgaagtggtgcgcttcatccttggaaatcatatctgccgcagacgcgccgaagcttgctactgttaaagccaatacactccctaatagtgcttttttcatatcattcctcctgttgatgaatctatatatttaacattagcagcaaatatgtaaatgatccgtatcaatattgtagaaggattgagcatcacgaccagccattactgacctgaacagcgggtacagcaggttcatctactatactgacctgtgcagtcgccatttatctgccggttgcgcctgaagcaattgaaacttacctgtaccatgaccatcaggagaacaatatgcacacgagtaaaaccctgaaaaggctgctagccgtatcagcagttgcagcaatgttcagcaccgttggcgtacaagcccagacaaccagcgccgcgcaaactcaaactgcgggccaggctcaaccggacgccagactcagctccggcgacgagaaagcattgaaggacatggcgcaggccaatatcaacgaagttgccgccgccaggctcgccctcgacaaggcccaaaccagtgaagtgaaaacattcgcccagaaaatggtcgacgatcacggcgccgcgctgaccaaagtcaagaccgttgcccagaaaaagggcgtggagctgccgaccgaaccagacgccgcgcataaagccctgaactcaaggctggaaaaccagcgcggtgacgcttttgacaaaatgtatatggaatatgctggcgtgaaggaccacgagaaggtgctgtcgaagcttaaaagcgacgccagtaaaatcgacgatccagatgtgaaggctctggccaacgagcacactccggtcgttgagcagcatctgaagtccgccgagcagatgtcagcgcgtgctggcgcatcagccgataaataacgcgtcggtaaaacaactactgcaaaataaagtggggcccgcaggccccacgcttatttccccttcctgctgaattattccggcaaggcgtagaccaccacctgatcgcccacctgatccttcaggatcgtattcccgccagccacgaaggccacatactggcgacctttatattcatagacggacgggttcgctaccgccggagcttcggcctgatcggaccacagctcttcaccgctctctaccgagtaggcacgcactttggcatccattgaggcaccgatgaagatcacgccgcccgccgtcactgccggaccaccaatggtaggcgaaccccagctttccggcatgaagaagccatactgctgggaggcgccaaccggannnnnnnnnnnnnnnnnnnnnnnnnnnnnnnnnnnnnnnnnnnnnnnnnnnnnnnnnnnnnnnnnnnnnnnnnnnnnnnnnnnnnnnnnnnnnnnnnnnnnnnnnnnnnnnnnnnnnnnnnnnnnnnnnnnnnnnnnnnnnnnnnnnnnnnnnnnnnnnnnnnnnnnnnnnnnnnnnnnnnnnnnnnnnnnnnnnnnnnnnnnnnnnnnnnnnnnnnnnnnnnnnnnnnnnnnnnnnnnnnnnnnnnnnnnnnnnnnnnnnnnnnntcctcacggctgtacagcttcacgtactggacgatatgcgaggtgttgacgatggcgatctgtttttgcggatcgaacgccaccccaccccactggacgccgccggcgctatcgggataggtgagcgtgccttcgcctttggtggttggcggggtatacattccttcataggtcaggttatcccacagacgggagcactggccgccaccgacgatatccgccagcttccagatttccggttttttcgactggtcgagcagcggcgcgggtttggtcgggaatggctgcgtgggcgagagaacttcgccctggaccgaaccatcaccctgcggaaccggacgttcttcgattggccatacgtcctcccccgtcaggcggttaaccacaaacaggaaaccctgcttggtggcctgcaccagcgccgggatctgcttgccgtctacggtgatgtccatcagcgtcggggcggagttgatatcgtaatcccagacgtcgtggtgtacccactgacgtgaccagaccactttaccggtgttgatgtccagcgcggtggtcgaggtgccaagcggaatagcgtctacgcggttgccaccccaatagttgggagacggcgatgagaccgggagatagaccagcccgttagcctcgtcggcggacatgtgcgtccagacgttggcggtaccggtacgcttgcggatctctgcggggatcgcctcaaaggtccactcaagcttaccggtctgggcgttgactgaaaatacggtgcccggaggggcttcggcataggcccagtccttcccggcccagcccaccagcagatggttgccgacaacggttggcggttgcaggacagagagcggatacttcgcgttaacggtgttccactggttcagatccagcacgccgttgttcgcaaagccgctgcacggtttgcctgaatcggcgtccagcgcaaagagcttgccgtcaacggtgcccatatagaccatcttctggcaagcctcacctgtcaccggatttttggcctgccagtaggaaacgccgcgatttttcagcaccggctgggtcagcgccttgcgcgacgatttggtgtcatagtgccacttctctttacccgtccccggatccagcgcaatcaggcgatcgaatggcgtgccgatgtagagcgtatcgttggcgaaaatgggcgttgcggaccagacggtagctggcgtatcgcctttaccatccgagacgtcgccggtatggaactcccagactttcgttaatttcccgacgttatccgccgtaatttgggtcaggggactgtatttctgcgcgttaagctggccgtggaagctgtcccaggtggcggtgccgggcaccagcggcgtcgctggctggctggccgaggcgactttctttccatcaccgctgccggttgaggcatcgtcggtggtttttgtggttccgggcgcctgctgatcggccgcatcaatgttcagtgattcctgtgtcccctgagaggcttcagcggccttatcctgcgcctgtagcgcgagcggagcgaccagcagcgccagcgccgtcatgctgacttttatgaagggataatgcttatcgttgtgcacgggcggctcctcagcttctgacgggatggttgtaacgagcggaatggctgctcagcataatcagaccaatcaggccgaccaccatgactgccgttatgatgtactggtgcagcagcgcggcggcgaaagcaatacccgccaacaccaccagggtgacaataatcagaaaaacgcgcgccccgcgacgcgatgccgcacgtaacataaaggtcaggatcgccagcactacgctggcaatgaccacgcccagtgcgccaatggtgccagtgacgccggtaagcggcgtccaccaggcgtatagcgccaccgcgaaggctattatcgcggtcagcagcagcaaaatgctaccgacccgcgaggattgagaatgcaacataccaggaaaccccctctaaaatgcaaaattgaccattattaaggcgttttcgtgaatatatacccctgctgcccgccgctattaagggaacgcgacgtgtggagcggcggcatatttcactaaacgtaactgagtatagaagaggattttcttatggggcgtttaatagcaggcatagacaccttgtgccccttcgccaccataaagagagcgttatgttacaagacggttcgaaagctacgagcgggttacgcgattgtctacattctgttttttaatttcaggcataacgggataatttcacgcccaataaaataattaaataagccccccttcaatatgatggcgccttatggtatttaataaaacagggtgtttattctttaattaacagacgtgcaggcagggaaagtcagtcgttatttgttcgttaatttaacaaatccctttcttaattaaccgcctgttaaagcatcgtcaaagaataacgatagttattgcaggcatatacataaggttttcggtatgcaacatcaaacccctcccacccgtgacgtaatggcgcagcgacgactacaggcagataaaaactaaataagtcgtcgcccctctaacaacgcggtaaaatatgatgaataaagccactactctctcagctaatattacaacacgctctaactggcactggcaggataacatctggacgctgggcctctatggtacagctgtcggggcgggaacactgttcctgcccgtggaaatcggcacccgtggtccggttatttttctggttatgctcctgctggggctgccgttatccctgatcccccatttactcctttgtcgtgtatatatgcgtgaagagaagactgaaaacggcacgttgccgatcttcggctccttcttcagcggacggggtgaaaagctgatcaccctgttctattgtgtgaccttcttcccggtaaccctggtttacggggtggcgctgattaatgcgctgagtaatttactggtggagcatctgcatattaccgccatcagccgtgggccattgtcgtttatcgtggttgctgcgctgtatgtggtgcttagcaagggccgggacagagtcgtggccattatgagcgcactggcactgccgttcgcggcatctgtactgctgatcgccgtatcacttatcccgggatggcatctgtctaacctgaccgatacggccgctgaaatgaacgccacgccgctgccggtaacgctgaaaaatatctggctgacgctgccgcttattaccttcttgttttgctgtgcgcctatggtctccccgctgagctcttactaccgggagaggaaagcggagggtgagaaaaaggcactgttcgtgatccgtatcgcctacttagctatcttcgccagtatcctctttttcgtgctgagctgcgtgctggggatcccccatgacaactttgtgcgagcgaaggcggaaaacctgaatgtgctgtcggtgatgaagggaaacggtgatttcagcctgatttaccacattgccccgctcatcgctatcatcggtatgacgaaatccttcctcggcgtaggtctgtcggtcgcacaaacgtttggtcagctggctgccagcgtatccggcaaaaaggccaacgccagcaagcggctggcctctctggcgctgttcctgctgacctatggcattgtttatgccaatccggatgtgctcagcctgattgaaatgttctgcggaccactgatcgcggtgatcctgttcctgatcccggcgtacctcatatacacccgcccctcgctggcagagcttcgcggcgtgacggtgtttttggtcgtattgggggggctggcaacgctgtctgcattgctctggacaatgctttagtctgaacgccgtttgactgtacccatatacagtagtattttacgttcaggctgaatcacatgcgtaatatccataaggtaaacaatcatgtttgtggaactggtttatgacaagcgaaacgtacaggggctggagggagccagggaaatcattctggccgaactgacaaaacgcgtgcaccggatttttcctgatgccagcgtgacggttaagccaatgcaagcgaacggcctgaacagcgacgccagcaaaagcgaccgtgaaaagctcaaccgcatgcttgaggagatgttcgaagagtcggacatgtggttaatacaagagtaaccgggcgcaaagcccggttctggcttcgggagacaaagagcatacaacgttaactttgcgtaatttcttccgctatcgcgacgtaccgatttacgcctccatggttcccccagcataatcccaccgatccgattgtaagacatatccagcgcgcgccacattttcttcctgccctgcactttcagtctgactgactggaggtttctgtgtgtggccttttgtgaagaatccggtttggggttattcgaggtagcccgctgaaatggaaacgtgagcaagctcatccgctatgaacgaggaacggacgatctaaggggtgttcatttcctggccattcgtttgccaagagcaaagcagaccattggcaggggaagcgtcactaccagcagcatccatagcaaagtatatactgtgtccaccccgtcattttgcagattggtatacagctttaccggtataccctgcgggaaataagcaaagatcatcacgatcccgaactcgcctaccgcgcgaacccaggcgagtgttacggcagaagccagcccaggcaatgccaggggtaatgtaagaaaacgaaagcggttccagggagaagctcccaacgtttgtcccgcttcaagaatatttttgggaacagtggcaaacgccgaacgcgacaccacgataaaataaggcaaagcgccgtaaacctgagccagcacaaacgccgccggattatttaccagcgtagctcccaacagtgaaagccagcggccaatcacgccataaggcccgaaagccgaaaccagcaaaatccccattgccagcggtggcgtcagcagagggatcatcaccagcagttcaccgatcaatcgttttcgacccgtggcttgtgacagccaccatgccaccggcatgccgataagaatgataattccgagcgccagcacacccagtcccattgagacggcaatggcgctgtcgtcgcgccaggccagcttcagatgatgccagggcgtgacgctaatcagcgtgataaaggggatacttaacagcaggatagcgggcagagataaccaccccgccacccagcccggttttcttagcgggcgtataagctgtctcctttaggttcggcgtagccaaacgctttgaacaatttctgcccctcggcgctttgcatgaacgatacgaacttttgtccctgttctacaccattcggcgcgtttttcagcaccgccgcatagaacaccattggttgagtgtgcaggatttgatcctggcctttgctgtctttaatggtaaaactgacggtgtcataccactgtttcgtcatcgccgggttgctgaggtttatttcatccggcagcgcgacatacggcaaatgcgctgagcgaacttcactctcgtatcccgctgctgcatccacctgaccgctttccagacgcgccagcagccctccttcctgatgagtctgctgtgggttttgcagcgagcctaaaattttattggtgatgcccggcatgttgtaatacttttccgccagcatcaggctaaacacaatattctggccttttgggtcgacataaggatcggtgcggccaaataagacatctttctgcgtcagcagagtcagccacgagccgtctttctttctgttggcctgttcaaactgcgctgcatatttaccctcaggactgtaagcgaccaccatgctggtactggcgacagggaccgcctcatctatcagcccggcgtctttgagaatttgcatcggccccggggtgatggagacaaacacatcggcctcaattttgtggcttgccagcaggcgtgccatcccgtatgcaccctggccctgcccctgatagccgtcgttatttgctctggaaaaagccggacctaacccctggtccattactttgcccatggaaccggcataagtcaccctgatatcctttgccagcgccatggatggcatttgcagcagcgcaaccgccaccagcacaacctgcattcgtttcctggccataaacaccctctcgttatatattcttttatatatcgaattttccagaaaaatcaccgcaatgacaacctcctcaagcgcgccgttgatgcaaggttgaataaaaggaaatcggtctgggtggtgcatggtcgacttagtcagatgttgtcatccaattgtgggcaattgttcatgaaacatgctgcgtaaactcctcgtggctttgcgtagaagaatcttgaactcattgtcatcaatgtcttttgcacagttgtagcccaactcgctatatagatagatacatagtgattaaataacttgaggagttgtgtattgctcaggattcccctcgagtctgagggcgtcctgttcattgaatatttacgcttttgcgtctggctgttttactgcatatccaacatacgtcttctttaactggcccaatgtttcaggcaccaggctcgtcacccgttcaaaccggcactttattcgttaccaggatggcaatggcatggcggccatcgccgtgtcgttgccgctggtggggccgaagcgcatttcggaacaggtgatggccaggatagcgataagctgattagatcagaatgtgtaactcatgcttaccgagacgctacgcggttcgccatagacggcagagtcatcaaggtatgagtagtattcgcggtcgaacaggttacgaacgtttgcctgcaccgccagctgtttcgtcagctgatactgcgcgaacaagtcgacgagcggatagctgccctgatagaggcgctgcgtctcgccgtccggaccggtgacatctttgtacacctgattctgccagttcacgccgccgcctacggtcagatccggaagcgccgggacgcggtaacggctgaacaccttaagctgcgtctgcggcgcaaagctgttgaagcggccatctgaatcacgggcaacatagcgggtcgcgctgaaggtaagctgtagattgtcggtaacggcaccgttcacctcaaattccgcccctttgctcactgcgcctttggttgcccgataagcttgttcgctggatccattaacgaataccccgctgatttcctcccccgcgttctcctgttctatgcggaatacggcaacgttggtggtcagtcgaccgtccatccagtctgccttcaggccggtttcataatttttaccggtgacgggagagagccatgcaccctctttcgtgcgtttggtttgcggggcaaaaattgaggtatagctggcgtaagcggaaaggctgtcgttgatgtcatacaccagcccgccgtaaggggtggtgttgtatttacgcatatcgccgctgctgccatttgagctgtactgggtataacgtgcgccaacgattagcgacaacggatccgccagcgacaggcgtgccgccgtatacgccgatttttgccgcacgatatcatccgcattttgataccagtcgccccactccggctcggccacgctgccgtcccagctgttgttgaagatgccaatctgagcactgtccattggcccgtctttgctgaaggtagcattgtgctgtcggctatagttggctccggccatcagctgatgttgacgcccgagaagttcataaggcccgctggcgtaggcatcaaaggcgtccagagtgcgcttgccgcgatccttactaccccagcctgatgcgccttctccggtggtggcgtccggattgcccatcacataaagcagggtatcattgaacgtttgctcgccgtgggttccattgaaacgcaccgaccagccgttatcccagttgtgggtgaggttagcaaaaactttacgcgactcaacggagtatcccgtccagtctgccgaggtattgacgttgcgatcgtaatgggtacggctgccgttactgtacaggctgggtaatccgccccaggtcgggttggctgtgtttgtttgctgatagtcccagcccagcgaggccgtcgtgtgttccgttacatcgcctgcaatgacgccatagagaaatttcttgcgcttgccatatctgtcgagccagctgtcctgatcctgataacctgccacgacgcgcccacgcaggctgccgtcggaattgaggggcgcggagatgtcgcccacataacgctgtttgttccagcttccgtaacttgcgctgacgttgcccctgaaggttttactgtcggcacgtttacgcaccatgttcaccgttgctcccggatcgccagcgccggtcatcaggccgtttgcgccacgcacaatctctatacgatcataaatggcagtatcttcctgcgcatcgccaaagttccacgcgtcgcccattgatgtggggatctcatcgtaggcgaaattggtgatttcaaagccgcgggaaaagtagctggaacgctcgctatcaacctgctgcgacgaaacgccggtggcattggtaagtacctggtcaatggtttgcaggtcttgatcctgcatacgctggcgcgtcacgacgctgactgactgggggatatcgcgcggggtcagcagcattttggtgcctgaacgcgtggtttttaccgcataatcctgctgcgagtcggcgctcccgttcccgtcaccgtagacaaccatctcttgttcttgcgtattttcatccgcctgtgccgggtgcatgacggcggacattgccagcgcaagcagtgaaagtgagaaggaagcaggaattaaccctgcgggcgctttcgcgcgattagccttgcctttaaaaatcatcatgttacctgtctgttgttgtcgttatgtgcaaatcattcatccaaataagaatggaaatgataattatttgctttattatgcacaggtaattttgtaagttaaatgtaaataaatgtatatttatcaaaatcagcgcggctcgcgcatgacaggaacaaaaaatgaacacattccattggctaaaaggaaagacatggggcttaagcattcttaccgcggcgttaaccctgagcgcaacggcgtcagcagccctcccgggttcggctgagctcaagcagcgcgaactcgctgacggtctgtatgagatggtttactccccaacggcaaacgcgttgtacgttgcgagcgcacagagtttcaaaaacgtcaatggcggggtgctctttaaactggatcccacaacgcttgccacgcaaggtgaaacccacaccgacctgaaaaacttcggcatggcagcggacgataatggcaaggtctactacaccaccaacacccttgatggcggggtatcgaaagtggacgtgcaaagcggcaaggtgctacagcgcctgatgtttgaaggcaaagacaaggatggcgacccggttggtgcgcgtgaaatcctcttccaccagggacaactgtttatcggcggcgttgccgaccctgggtttatctccgtggttgatgccaacaccatgacgctaaaagcccgaatcgaaaatgccgggaaatgggtgacggggattatttattcgccgctgacagaccgcctttatgccgccaatggcggcggtgaaattctggtgattaacccggagacgtataaaatcgaacagcgctggacgccgggagataaaaaagcgtatttgttcctgaatatggcagaagatccggccaccgggcgcctgttcgtgactgatgattcaaaagccaaaaccacactggtatttgatgagcgcagcgggaaagttatcaagcgtcttaaaggcgatgcgctgggaataaagtttaacgctgagcgcaacgaaattttcatcactcagcgcgaatccaggaaggtgttgcagcttgacgccgggagctatgctgtgaaaaacagctggacgttcaccagccatcccaacagtcttctggtaacaccggacggtaaaacgttatacgtaaccgtgaagcaggacttcaatgacgacaatacgacgaaaggcccggatagtgtggttcgtatttcattaaattaaacaatatacagccatcctgtgagggatggctgacttataaacgtggacgctgaagcagtatctttagtccggccaacggataaagccgggttaaagcgccagatgttctaaagtcgcggggatccttactgggtaaaagtaaaggtgtagctacgtgaagctggcccctatcctcctgcaaatttcgcagaattaaggattcattttgggaaagaaaaaaccgggcctcgcgcccggttctgttcccacactaaaaagccttacgcactcaatccgcgattctccagcatcggttcgatcttcggatcgtgcccgcgccagttccggtaaagttcagctaaatcagtgctgttgccgcgggacaaaatcgcctcgcggaatttctgtccgttcacgcgcgtcaaaccgccctgctcgacaaaccactgatatccatcgtccgccagcatctgcgtccagagataggcgtaataccctgccgcgtagccgccgccgaagatgtgggcgaaatagctgctgcgatagcgcggcggtacggctggaagatccaacccctcttttttcaacgcggcggcttcaaaggcttccacgtcttcaatgggctcctgaatgccgtgccagttcatatccagcagcgcggcgctcaatagctccgtcatgtcataacccttattaaactgggtcgcattgagcattttttcccgcagcgcatccggcatcggttcgccggtttgatagtgacgagcaaagtgcgcaaacacctggggatggctggcccagtgttcattgatttgcgaaggaaattcaacgaaatcacgtggcgtgttggtgcctgaaagcgtggcatagcgctggctggcaaacaggccatgcagggtatggccaaactcgtggaacagggtaatcacatcatcccaggagattagcgcggtctgcccgttcgccggtttttgatagttgcagacgttataaatcaccggacgcgcggcaaactcataagactgctcaacaaaattccccatccacgcgccgcccgctttggaatcacgcgcgaaaaagtcgccgtagaacagcgccatgccttcacccgtgtggtcgaaaatctcccacacgcgaacatccgggtggtaaaccggaatatcaaaacgctcgacaaagcggataccgaacagctgcgtggcggtccagaatacgccatcttccagcacggtattgagtgcgaaatagggtttgatctgcgactcatccagcgcgtatttcgctgagcgcacgcgttcggcataaaacgcccagtcccaggcctgtaccgtaaaaccaccctgctcatcgtcgatgaccttctgaatatccgcctgctccagcgcggccctgccgcgtgccgcaggaactatcccgcgcatgaattcgagcgcggcttccggcgttttcgccatctgatcggcaatgctccagctcgcatagttgtcaaagccgagcagctgcgcctgtcttgcccgtaacccggtaagccgacggatcagctcgcgcgtatcgttttcgtcgcctttctgagtgcgttcccagcccgcgctgaacaactttttacgggtctcgcgcaacgacagcgccgctagcgcgggctgttgcgtggtattcaaaagcgggatcagccagcgatccgtcagccctttttctgcggcagcgtgagccgcggcagccacctcctccgcactgagcccgtcaagctggtgaacatcgtccaccaccagccctcccgccttgttcgccgccagcaggcgctggttgaactggctggtcagggtggcggcttcggtattcagtgctttcagctcggctttttcatcggcattcagacgcgcgccagcaagaacaaagtgctgatacatctcctccgtcagtcgtcgggattcggcatccagcgcctcgcgatcctgccagacggcttccacgcgggcgaaaagcgtatcgtttagccagatatcgttcgccagcccggccagttcggtggagaactgctcgtccagtgcctgaagatcatcgttggtgtgtgcggacgtcatggcgaagaacacgctgctcacgcgtgacagcatggccccgctcttttccagcgccagcacggtattgtcgaagtccggcgcggcgcgctgcgcgataatcgcgtcaatgtctgcacgcttcaggcgcattgcttcatcaaatgccggacgataatggctgtcgttaatcgcatcaaaacgtggcgcctgataaggcaacaggctaatttcaaaaaaaggattgttgaccgacatcgtttactcctgagcacggtatttctccccagagtaggccagcctgcgccggcctgcaatggcgtcatacaaatgttgccttaacgacgtgccggagagcgtgctatgttagtacaacacaaaaagcgttgaggaacagtgagatgattattttagttaccggggcgacagcgggttttggtgaaagcatcacgcgtcgcttcgtcgccaacggacacaaagtgattgcaacagggcgtcgtcaggagcgtttgcaggagctaaaagacgagctgggtgacagcattctgaccgcgcagctggacgtccgcaaccgcgccgccatcgaagagatgattgccaacctgcctgccgaatggcgtgaaattgacgtgctggtcaataacgccggcctggcgctgggcatggagcctgcccacaaagccagcgtggaagactgggaaaacatgatcgacaccaacaacaaagggctggtgtacatgacccgcgccgtgctgccgggcatggttgaacgtaaccgtggccatatcattaacatcggttccaccgccggaagctggccttacgcgggcggcaacgtctatggcgcgaccaaagcctttgtccgccagttcagcctgaacctgcgcaccgacctgcacggaaccgcgatccgcgtgaccgatgttgaaccgggtctggtaggcggaaccgaattctccaacgtgcgtttcaaaggcgacgacgcgaaagcggataaaacctatgaaaacgcgaatgcgctgacgccggaagatatcaccgaaaccgtctggtgggtcgcgaatctgccgaagcatgtcaacatcaatacggttgagatgatgcccgtcagccagacctatgccggactaagcgtgcatcgcggttaatttaccctgcccggcctgcgggccgggtatgtgatggcagggaaaagaatggtagtatgttcaggttaactctctgagaaatcacaacccatggccgctgaatcgcaacttaatcctacccagcccgttaatcagcaaatatatcgcatcttacgccgtgatattgttcgctgcctgatcccaccgggaacgccactctcagaaaaagaggtttcggtacgttttgacgtttcccgtcagcccgtacgtgaggcgtttattaagctcgcagaaaacggccttattcagatccgccctcagcgcggcagctatgtaaataaaatttcgctttcgcaggtacggaatggctgttttgttcgccaggccatcgagtgcgccgtggtgcgtcgcgccgcgtcgctcatcaacgataaccagtgctacctgctggagcaaaacctgcatcagcaacgaatcgccatcgaccgcaaacagttaaacgactttttccagctggacgacgagttccaccagaaactggcgcagatcgccgagtgccagctcgcgtgggataccgtcgaaaacatcaaagctaccatcgaccgcgtgcgctacatgagcctcgaccatgtttctccgccagagatgttgctgcgccagcattatgatattttcagcgcgctggaaaaacgcgacgtggaagccgtagataaagcgatgacgcttcaccttcaggaaattagtgagtcagttcagttaattcgccaggaaaaccgcgagtggttcagcgaagaataaaacctcgccgccccctttcggttgcggcgaagtaattagcggaccactaataccggaatagtggcgtagcgcagaatagtttcagcatttgaacccagcagatgggttgtaatgctcggattttttgatccgataacaatgacatcatatttcccctctttgctgagcttgatgatttcatcgcgtacgttgccgaagcgaacttcacagtcaatattgtccggggacatatcaaagagccgtttcagcgccttcatcttcttatcagactcggcggtcatatactcttcgaacttcttaatatcggcattgaacccccgcagtaacgaacggctgctgttagggagaatgttgaccagggtgatcgtcgcgccttccgccttcgcgaggttgaccgcgtggcgtaccgctttatcgctcaaatccatttcaaacacgtcaacaggcatcaaaattttcttatacataagcctgactccttttccgatgaagggttattttctgcctccagaatgacattgtggatataaacaaagcctaaacacttgcacccggaaactatcaattaaggaaaataactgtcggctttgtaaagtggtgtcctgaaccgtcaacgcctgcatgaaataagaaaaaagtgtgagcttgatcaaaagcaaataatttcgttaaagagaggcgtattaatagtgccccgtgaacggcagccgttgaattagcgccgtaacggataagtacgagaggagaaaataccatgatgacatacgaccgtaaccgaaatgcaatcaccactggcagccgcgtcatgattagcggcacaggccagttcggcgtgattaaagcgatccacagcgacggccttaatgccgagcaggtgcgccgtggtaaaacggttgaagtcgaaggatgcgaaggtaagttcgaaccgattgagctgattcgcctggggatgcactaagctgcgccccgacatgccgccgcggacggcggcatgtcatcgcgttaaagccgggaggcgtactcagcaaccgtggccttcgcgcctttttgcagcaacgtttgataggcctgcatgaccgcagccacaaacaccgcgtccttcggcagctcgttaccgaaaatagcctcaatgcccaacagcgcgctaacgcggctttcgccttcagcgctaccgtttaccgccgcctgaatcaccgccagctgcggatcgctcacctcaatcgcgttaccctgctcatccacaccgccgacataacgcatccagcccgcaacaccgagggccagcagcgggaagggtttctggtggacaaggtgccagcgaacggaatcgagcatccgctgcggcaatttctggctaccgtccatggcgatttgccaggtgcggtgacgcagggccggattgctgtaacgtgcgatcagctggtcggcatagtgagctaaatccacccccttcactttcagcgtcggcgcctgctctttcagcatcagcgcatgcgcggctgcgcgataatgttcatcttccatgcagtcgttaatgtgctgataaccggccaggtagccgagataggccaggaatgagtggctgccgttaagcatacgcagcttcatctcttcaaacggaatgacatcagaaaccagttccgcaccggccttttcccactgtggacgtccggcgacgaaattatcttcaaccacccactggcggaacggctcgcaggcgacacctgccggatcgcgtacgccggtcagctgttcaattttatccagcgtttcagccgtgacggcgggcacaatacggtccaccatggttgacgggaaggtgacgttcgcttcaatccagtcggccagttcgccgtcaacagcgcgcgcgtaggcgcaggtgacattgcgcatcacatggccgttttccggcatgttatcgcatgacatcacgctgaatgctggcagccccgccgccttacgccgcgccagcgcttcaaccactacgcctggcgcagatttcggctgatgggggttttgcaggtcggcaacgattaacggatgatcgaacatcagttgtccggttgccggggagtggcaataccctttctcggtgatggtcagggaaacaatggcgacctgcggatcgcacagcgccgccagcacggtttcaaggccgtcgacctgcgcatgcagcgcatttttgacgacgccgaccacgcgcgccgtccacgcatcggcagacatctctgctacggtataaagattatcctgtgccttcagatcggcgatctgctgttcgccgccaatcaggttaacttcgcagtaaccccagtcgctgccctgttctgcggcgagtatatcggtgtacaccgcctggtgcgcacggtgaaacgcgccaaaccctaaatgaacaatgcgtgccttgaggctgtcgcgatcgtactgaggacgcgttgccttcgcctgtaataaacggttttccatgattgagactcgttaattatgaacgctgagatccgcagccgctctggtgacagtgcggctgcgccggttgactaaaccaactagaatggcagtgtcattactttatcctgccgatcacaatactggttatgctgccatgaacattgatttacattaactttcggccaagtggtgtgatataaaaatcaagttgtgtgacatctggcaaaagatataaaccagatcatacaggggtgcgcaccgtctgctcgccggaccggaccgtcggctcacgccacaacctgtcgtaggaatagcctgttaaatcttccacgacccggcgagcttcggcggatacgcgttggggagagccgttggctttcaggcgatccagctcatccacaaagattttgtgcgtacgcttgttcaggttgaatgtcagagcctgccacagggccaggataagcaaggcagcagtgccgatgaacatcagcattgcgatggtgtggatggcttcggttggctgtgtctggctcccttttacaaatccgccgctttgtaacaggagacccacaataaaggtggcaatagcgaccgtggtttttcgggaaaatgtcattaccgcggcaaacagtccctcacgacgctgacggctgaccatttcatcgatatctggaatgaacgggaacacgttccacggtgtaaactcaaggacgcagcgccccacctgatacaccccggccagaatgaccagcgtcgcgacggtattcagcgcagggatctggtacacggcaaagaagccccccaaacagagcaacatcagtgaataggcaaatacatatagctttgatggcccatatctgatgatccctatacccgcaattaacgtgacgggcagccccacaatactcatcgacagcagcgtgcctgccagtgaggaagagacattcagacagtagacgcagaaaaatacaaataccgtgttgtagacatctttgccggtaaacgacagcagatagatggcgagatgtttcctgaaggcccggattttcagggtggaaccatactccttaaaaagtcgtccaaaggcagccagcttctcccctgctgtttgtgggcgtgtgtttttttccagcccggagagcatttccggcgtcaactcgcgttcccaggtcactttccacgagatgaatacacataccataaacagtacagcaaaaataacgccgtttatgaggtaggcatgggcgctgttttccccgaaatagccgatcagtaatccgggaataaatgtcgccagaaacgtcccggacgctgaaagaaacatgcgacaggtagagagtttggtccgctggttaaagtcttttgtcatttctgacggtaacgtttcccacgggatcagtaccattgcagcaataatttcaaatgctagatagacggcgagataaaaaccgtatgtcatgccatcaagccacagcaatgcatagaccagcatcaacggtgcaccgatcagcaaaaagaaacgtcggcgaccaaattttttaccaaaatagtttttgtaaaaatggtcagtgaaacttcccataaacaaactaacgatagcatcgacaatgcgcgctatagcaacaatagacgccgcttcaaccggtgacaacccaacaaatgtcgtatagaagaataataaccaggcgccgataacggtaaaggcaccgccgcccataatatccgttagtccgtagccgatactaaccggaatagtaattttttttgcagtacgagacatgttccatccccactcagtgagtagaatttagaatctgaaatagttttcagcattatcatggcaaatatttttaaccatcttcgttaggatggcgttattatccggaacttcaccacgctccacccagccaccaatgatattgcacaaaatacgtcggaaataatcgtggcgagtatacgaaaccagactacgggaatcggttaacataccgacaaaattcattaatagcccctgatccgcaaggctatgtagctggttttccattccgcgttgagtgtcgttaaaccaccatccggagccaaactgtatcggcgatttaacgcccaattccgcagtctgaaaattagcgatagtcgtcgcgacaatatcgttatagctggcgttgaggttatatagaatggttttgggcaaagcttcagcctgcgccattgcatccaggagttggttgagattggccgcaagattcgactgatcggtcagcgagtcaaaaccagtattactacccaaagaacggtacatgcgggaattattattgcgaatcgcaccgaagtgtatctgcattgcccagttatgctgcctgtaattatgcgccagcataataaaaatggcactgtcaagaatcgcattattacgggcgtccagattttcaccccggcgctttcgggcaaacacggattcaacctgtctttcatctgctgactgaaaatggatctccacgggtccgtgatcggaaattcggcaccccatttcgtggaaccaggcaatacgctggctcattcccttaacaaaaatcgctgaatgtctggattttaggtcctgtcgtctcacctaatcgatcgataaagtcggcaaactgttccgcgttttgcgcaaaaacatcgtccggacgaaaggtcggtaataccttaacgttgaacgtcgcgtcatcacgcaataattgatggtagcgtaaatcatcaagcggagcatctgtcgtgcaaataacttctaccctggagcgtttaatgagttccctcggcgtaaaatcaggctgctgcaatagcagattacagtgctccattatttcacgccagttatgcctgcctagcggttcgtcacagttaaaatagtggtgaagttctaaatgagtccagtgatagagcggatttccatagctcgcttcgaccgtttcagcccatgccgcaaatttatcctccgccggggcatcgcccgtaatgtatttttcgtcaataccgttggcgcgcatggcgcgccatttataatgatcgccagccagccagagttcggtaatattatcgagatttttattctcgaagatatctttcgcgtccaggtggcagtgataatcaataattggcagcgctttcgcgacgttacgataaagttcaacacctctcgcattgccaatcataaagttatcgttaataaaactcatgacagggctccatatttccgctgcttcgctgcggtatcgctctggcgcaggggttcagctgcatcttccaccaggctcaaatcgcggtcgcgcacttctggcatcagcaaagcggagaccagcccaatcagcgagtacgccaccagcatcgccacaatcggccaccaggacccggtcatattgcagaagatccccgccagcactggaccaaagcctaccgccaccagaccgcccgcctccttggagatcgccatgcgggtaaagcggtttcgcgaaccaaacatctccgccatggtgatgttttccagcgcaaacagcccgagcaccgcaaagttatgaataacgatgatagagagcataatcacgcccggcgcgtaactcttatcgacgataatcgacagcatcgggtaagccagaataatggctgaaatgttaaggaggatatatggcagacggcgccccactttatcggacagccagcccagcagcgggatggagacgaagccaagaatcgagctgatcatcagcgcatcggttgggatcgccttatcaaataacagcgtctggaccaagtacccggcaaggaaggtctggataagcccagagttaccggcctgaccaaagcgcagccccgtcgccagccagaacgatttgctcttaaacatcgcgccgaccgaggtatcctgcacagcaaccggcgcaacggcttcggcatcgtttaccttctcaaacaccgggctctctttaaggttcatacgcagccagatggcgaagatcatcaccaccacgctggcgaggaacggcacgcgccagccccaggcaataagttcttcacgatcgagggcaaagaacatcacggcccagatcgccgtggcgctcagcgtcccgcagttggtgcccatggccaccagcgaggagatgatgccgcgtttacccttcggggcgtattcggccagcatggtgcctgcgccggagatttcagcccccgcgcccagcccctgaataatacgcagcgtcaccagcagcaccggtgcgaaaatcccgatctgcgcgtaggttggcaggacgccgattaaggtggtgcagatccccatcatggtgatggtgataaacagcacttttttacggccaattctgtcgcccattctgccgaagataaatgccccgacaatacgcgcgatgtagcctgcgccgtaggtgcccatcgccaggatcagcgccatggccgcggactgctcaggtaagaaaatttcatgaaacaccagcgcggcgccaagggagtagagctggaaatccataaactccagggcggtgcccagccagccagatacggcggctttcaccagatctgacgtacttctttgaggttgtgcttgagtcataatggctatctctgcaaggtaagatgcgtaccactgagagcctgtcttcgcaggctcttaaccgcgtgaattattattggtcgaacgtgagcaagactttgcagcactgccgctggtctttttcaaacagttcgatggcgtctgtaacgtggtgatagtcaaatgtatgggtgaccagtttttcagggtcgatcagccctttttccagccagtcaatgaccaccgggaatttgttggcattcaggcgcgaagagaagatcgacagctctttgccggtgatcccctgctgcacaatctggctcgggtcgctggagaagcccatcagcacgatgcgcgccgccggagacgccagcgtaatcgcttcctgtaaaatggacggatgacaggcagcatcgatgattaacgtcggcttgatgcctctttcatccagcgcggtctgtaaggactgctcgccgttgttgaaaacccagtctgcgccgctgcgttgcgccatctccagccgctcatcaatgcgatccaccacgatgacctgcttcaccttgtaaacgcccttcagcgcctgcacggtgaccagccccatcgggcctgcgccgtaaatcagcgccacatcctgttcggtgggtttcgcctgccccgtcacgttggcggcaatggtgaatggctcaaccatcaccgcgtggtggtcagggatcgcatccggaatgcgccaggcatttttcgccggcaccacggcgtattcgctgaagccgccgtcacggtggacgcccagcaccaccagcgaagtacaaacgttcggttttccaacggaacacgggtagcagtgcccgcagctgatcaccggatcaaccgaaacgcgctggcccagtcggatgccctccacgccttcgccaaccgcgtctatttcgccaaagaactcgtgaccgattacccgcgggtatttcgcaaacgggttatgcccgcgatagatatggctgtctgaaccgcaaataccggcgagcttaattttgacgcggacgtcgcctgcgcccggcaacgggagaggacgctcttcaatcaccagcacatccggctgttggatcactacgcttttcatcattcgctcctcgtttaccagttccagagggtgccgtcttccagacgagccaccggcagataagccggatcgtacgggtatttcgccgccagcttctcatcaaactcaatgcccagccctggcttgtcgcccgggtgcatatagccgttatcgaagcgccagctgtgcgggaacacttccagcatctgctccgaataccccatatactcttgcacgccaaagttcggtacccacaggtcaaaatgcagcgccgcggcgtggcaaatcggcgacagatccgacgggccgtgtgagccggtacgcacctgataaagtgaggcaaagaccgcaatgcgacgcatcccggtgatgccgcccgcatgggttatggtggcgcggatatagtcaatgagctgctcttcaatcagctgcttgcagtcccagatgctgttgaacacttcccccaccgcaattggcgtgacggtgtgctggcggatcaggcggaaacactcctggttttcagcgggagtcggatcttccatccagaacagacggtactcttcaatgcttttgccgaatcgcgccgcttcgatgggcgtcagacggtggtgcatgtcgtgaaggagatgttcattgaagccgaactgactgcgcactgcgtcgaacagtttcggcgtgaagtcgaggtatttttcagtggaccacagctgctcttccggccaggcgcccttggtcgctggctcatacgccagcccttttccttttgccatgccgtaggtggttttcattcccggcacgccgcactgcacgcgaattgccttgaagcccatctctttatgacgggcataatcttccagcacgtcgtcaatggtgtgcccggtggtgtgacaataaaccatcaccccttcccgggaggctccgcccagaagctgatagagcggcatgttcgcggctttcgccttaatgtcccacagcgccatatccacggcagaaatcgctgacatggtgaccggaccacgacgccagtaagcgcctttatagaagaactgccagatatcttcgatgcggtgcgcatcgcggccaatcaactgagggcacaggtgatctttcaggtaggaggcaacggaaagttcacgtccgttcagcgtggcatcacccaggccgacaatgccctcatcggtggtgattttaagggtgacaaagttacgccccgggcaggtgacaaatacttcagccccgacaatcttcataatccatttccttacatcgctcgttgtgatgcaggaaatttacgcaactacactactaccatacaagtataatgatcgtaaaatcagcgggcgatcacactataaggacgcttatgcgcgtccccaaccggccacgatgatcaacatgccgcacagggcaatcagcgcgcctgcccagtcatacaggcttagcctgacgccatcgacaacgcgcagccacagcagcgcggtacagacgtacactccgccgtaggccgcatataccctcccgctggcggccggatgcagggtgagcagccagacaaaaagggccagggacacacccgccgggatcagcagcagcgcggaagcgccccgctttagccagagccacggcaaaaagcatccgatgatttcgcacagtgcggtcgcgaaaaaaagcagcgtcgttttgaacatttttctcgtttcgtgaggattgatttagacatcatacgcgataatgttcacatcgttcccatacctgccgcgcgggtatgacaccctttcggattggtgtagaatccaacggggtaatccgattgtctgcacccgtttaaaggaaacgctatgactacattaagcaaacgcctttgtctgacagccgtactggcgctgtcatcgttcgccttcgccgcaacggcatcagccgaaaccagcaaactcatcattgagtctggtgacagcgcgcaaagccgtcagaacgccgccatggacaaagaacaatggaatgacacccgcagcctgcgtcagaaagtgaataagcgtgtggaaaaagagtgggataaagaagacgtcgcgtttgatgcccgcgacaaatgccagcaaagtgccaacgtcaacgcctattgggagcctaacaccctgcgctgtctggatcgtcgcactggccgcacggtagcaccgtaatgtcgacgccgtgtgacgttaagctccgtccgctggagcgcgaagatttacgctttgttcaccagctcgacaacaatgccagcgtgatgcgctactggtttgaagagccttatgaggcgtttgtcgagctgtccgatctctacgacaagcatatccacgatcagagtgaacgccggtttgtggtggagtgcgaaggtgagaaagccgggctggttgaactggttgagatcaaccacgttcaccgtcgggcggaatttcagatcattatttcaccggagcaccaggggaaaggtcttgcgtcgcgggcggcaaagctggcgatggattacgggtttaacgtcctgaatctctacaagctttaccttatcgtcgacaaagagaacgaaaaagcgattcatatctaccgtaagctgggctttatggtggaaggtgaactgatccatgagttctttattaacggcgaataccgtaacaccatccgcatgtgcattttccagcatcagcatctggccgggcataagtcctcctccgccagcctgcttaaacccaccgcgcagtaacctgcgcggttttattctcaataatattcaatgctgtttttgatggtgtacttgtgctcaacggcaggtttgacgctgtcatcggtgatcaccagctcacagctcaccgggttattgtggcgatcgtaatcacagctctgctttacattgcccatcggtttatcgttcaacaggcttaccgccgtataatccatgcgcttgcgcagatctttcgacggcaccgacttgaccgataaacgcttgtcgccggaaaccgtagttttacccagcgggtagccgtcggcgtcatactggtacttcacttccatctctttgctgtgcgcggcaaccacaaacccgttatcgtccgtgtcccacgtcaggccggcagacggcagttccgccagctgacattttccctgcaactttaccttctgctgctgggtttccgcatcgacgtagtagttagcatccagcaccagcgcaacgcccgtattagcgtcgagatcgtgcagttcaagcgtatcgaaacacccttccgttgacatcgtgccggtcacacgtttagagacttcacccttatcgttgaacagcgtctgggtaaaatccttcaccggcccgcgcagaggatcaaagtcaaactcgttcgaaaaactcgccatctccggcgtaaatgacagcggcgcggtgttgttgtcgcatcccaccagtaccgttgccagtagcgttatcgctgcgtatttgttcacatcatttaccgttcaaagagagatacaatcatattagcaaatacagcaacttacataacagcacttcatttgactctttgcgctgtataaatccgtcgtttgcattgacgagacctgccaaagtggctacgttgggcgcggaagattccacactattataaaattagattcttaaattttcgggttaacatcatgatttacgactgttttttatactatgacgaagatatgttgctcgacatcagattacatactctcgctgatgtcgttgaccgttttgtcattgtagaagcaacacactcttttacgggcataccgagagaattgcatttcgatattacaaagtttgccaaattcaaagacaaaatcatttacgtgccttttgacgcgcagcctattttaaaccgtgcggataataaccaggttgatgcctgggcaaatgaagcagcgcttcgcaactccattatgaacgggttaaaagacgcggcagacgacgatctgattctggtgtcagacgttgacgaaatcttctctcccgacacggtcagggccattaatccgcgcgcgctctgcacgactattcatcaaaacgtgttcaactatcagtttaatctccaggttcacaacacggatggtacgccgagaaaatgtaccttgccccgcgcgacgtcctattacaaccttaagcatttcttccacggtgagcctgaatctttcagaaactggaagcgtgcgcgcaaagataaaaactggtcatggtttaaatggaactggctaaaaatcaataataaaattgtgaaagatggcggctggcatttctcatgggtaatgactccagaaagaatttccgaaaaaatgtctaccatttctcataccgaatacgatctgccggaatttaataacccggaacatattatgaaggttattaccaacgccgaagatatctggggacgagaccgaaaactggtcaggcaagaggtatcaaaacgcaccctgccttcttatctggtagacaatcagcaccattactcgcaatttattttatgacgcaggcagggctccaggacaattcagaaagacaggtccaaaaacaaaagcttaccctaaccctgctatgcttacagtccacacagtgaaaaggagctacagatgaaacggttaccctggattaccgccctgctgttaatgagtgcttcacccgctcttcttgcggccccggactcctgcgagcgcgtgaaaagcgacattcagcagaagattatcaacaacggcgtaccggagtctggctttaccctgaacatcgtcccgaacgatcaggccgatcagccggatgcgcaggtcgttgggcattgtgccaacgatactttcaaaattttgtacacccgcaccagtagcggcaactacccggtgagcggcgcaggtacgcaagagaatgcgcccgctgagccgcaatgattttcccactcaattcccctgatttgacgaggattaatatttaatacctctaaataagtaacactccccccatcattagcccggttgtagtcacgggtgaaaataattattaacaatgatggggtgagttatgtccgaagttgaacatcacggcggtataagccgtcgaactctggttaaatctactgccataggatctctggcgcttgccgccggtgggatcgcattaccttttggtctgaaaagcgccgccgccgctgtgcagtccgctattcagcccgcagaagacaaagttgtctggggcgcctgctcggtaaactgcggtagccgctgcgcgctacgtctgcacgttcgcgatgacgaagtctactgggttgaaacggataataccggcgaggatatttacggcaaccatcaggttcgcgcctgcctgcgaggccgttcaattcgccgtcgcattaatcacccagaccgtctgaactatccgatgaaacgcgtgggcaaacgcggagaaggcaagtttgagcgtatcacctgggaagaagcgctggacaccatcgccgcgagcctgaaaagcgtggtcgaaaaatacggcaacgaagcggtctacattaactactcctccggaattgtaggcggcaacatcacccgctcctccccttatgcctcgctggtcgcgcgcctgatgaactgctacggcggcttcctcagccactacggcacctacagcaccgcgcagatcgcctgcgcaatgccctacacctacggcagcaacgacggcaacagcacatcggatatcgaaaacaccaaactggtcgtgatgttcggcaataatccggcggaaacgcgcatgagcggcggcgggatcacttactaccttgagcaggcgcgcgaacggtcaaacgcgcggatgatcgttatcgatccgcgttataccgacactgccgcagggcgtgaagacgagtgggtcccgattcgtccgggcaccgatgccgcgctggtggcaggtattgcgtgggtgctgattaatgaaaatctggtcgatcaacctttcctcgataaatactgcgtgggttatgacgaaaaaaccctgccggaaggcgcaccggctaatggtcattacaaagcctatattctcggccagggtgatgacaaaaccgcgaaaacccctgagtgggcgtctcgcataacgggcatccctgccgatcgcatcattaagctggcccgtgaaatcggttcggcgaaaccggcctacatttgccagggctggggcccacagcgtcaggctaacggggagcaaacgtcccgcgccatcgccatgctgccgatcctgaccggcaacgtcggcattaacggcggcaacagcggcgcgcgcgaatcgacctacaccatcaccatcgaacgcatgccgctgccggaaaatccggtgaaaacgcaaatctcctgcttcagctggacggatgccattgcccgtggaccggagatgaccgccctgcgcgacggcgtacgcggcaaagataagctcgatgtgccgatcaagttcatctggaactacgcgggtaataccatcatcaaccagcactccgatatcaacaaaactcacgacattttgcaggatgagagcaagtgcgaaacgatcgtcgtcatcgacaactttatgacctcgtccgcgaagtatgccgatattgttctgccggacctgatgaccgtcgagcaggaagatatcatccccaacgattacgccggcaacatgggatacctgatttttctccagccggttaccgccccgaagttcgagcgcaagcccatctactggatcatgagtgaagtggcgaaacgcctcggaccggatatccatcagaaattcactgaaggccgtacgcaggagcagtggctgcgctacctgtacgccaaaatggtcgccaaagatccgctgctgccgtcctacgacgcgctgaaaaaaatgggtatttataagcgcaaagatcctaacggacatttcgtggcctataaaaaattccgtgacgatccggatgccaatccgctgaaaaccccgtcgggcaaaatcgagatctactccagcaagctggcggatattgcggcaacctgggaactgcaaaaagacgaaaccatcaccccgctgccggtctatacctcaacctttgaaggctgggacgcgcccgagcgcagcaagttcccgctgcaactgttcggtttccactttaaagcccgtacccactccagctacggcaacgtggatgtgctccaggccgcctgtcgccaggaggtgtggcttaaccctgtggatgcggagcaacgtggaatcaaaaacggggatatggtgcgcgtcttcaacgaccgcggcgaagtgcgtattgccgcgaaagtcaccccgcgcatcatgcccggcgtaagcgcgatggaccagggcgcctggcatgacgccaacatgaacggcgatcgtgtcgatcacggctcctgcatcaataccctgaccacgcaccgcccgtcaccgctggcgaaaggcaacccgcagcacacgaacctggtgcagatcgagaaggcataaggattaaccgatgactacccagtatggattttttattgattccagccgctgcaccgggtgtaaaacctgcgagctggcctgcaaggattacaaagacctgaccccggacgtcagcttccggcgtatttatgaatatgcgggcggcgactggcaggaggacaacggcgtctggcatcagaannnnnnnnnnnnnnnnnnnnnnnnnnnnnnnnnnnnnnnnnnnnnnnnnnnnnnnnnnnnnnnnnnnnnnnnnnnnnnnnnnnnnnnnnnnnnnnnnnnnnnnnnnnnnnnnnnnnnnnnnnnnnnnnnnnnnnnnnnnnnnnnnnnnnnnnnnnnnnnnnnnnnnnnnnnnnnnnnnnnnnnnnnnnnnnnnnnnnnnnnnnnnnnnnnnnnnnnnnnnnnnnnnnnnnnnnnnnnnnnnnnnnnnnnnnnnnnnnnnnnnnnnnnnnnnnnnnnnnnnnnnnnnnnnnnnnnnnnnnnnnnnnnnnnnnnnnnnnnnnnnnnnnnnnnnnnnnnnnnnnnnnnnnnnnnnnnnnnnnnnnnnnnnnnnnnnnnnnnnnnnnnnnnnnnnnnnnnnnnnnnnnnnnnnnnnnnnnnnnnnnnnnnnnnnnnnnnnnnnnnnnnnnnnnnnnnnnnnnnnnnnnnnnnnnnnnnnnnnnnnnnnnnnnnnnnnnnnnnnnnnnnnnnnnnnnnnnnnnnnnnnnnnnnnnnnnnnnnnnnnnnnnnnnnnnnnnnnnnnnnnnnnnnnnnnnnnnnnnnnnnnnnnnnnnnnnnnnnnnggtgatcttcaccgttttcgggcagtgcgtggccggcgcgttaatcgtgatgggcttcgtctggctaaaggaaaatgatgacaaggccagaatgcgtatcgtgcgcagcctgttttgtctctggctggtaatgggcattgggtttatggcctcggtactgcatcttggctccccgctgcgtgctttcaactcgcttaaccgcgtgggcgcgtcagcgctgagtaatgagatcgcggcgggttcgatcttctttgccgtgggcggtttctggtggctggtgtcggttatcggtaaaatgcccccagctttgggcaaaatctggctggttgtcagccagatcctgggcatcgtttttgtctgggcgatgacccgggtctatcagattgagactgtcccgacctggtatacgggttacaccacgctgagcttcttcctgacgatggttctggctggtcctctgctggccgcgctgctgctgcgcgtcgcaaacgtgacattcaaaggtactcttgccgcgtcagtcagcgtactggcacttatcgtctgcgtggcggtcgtcgtgttgcaaagcaatacgctggggacaatacagagttccatccagcaggctaacgccctgcttccggattatggttcgcttcaggtatggcgcatcgcgttgctggcagcgggtttaggctgctggatctgcccgctgattcgtcgtcaggagccaaaaacgctcggcctgtttgcaggtgtcgtgctggtggcgctgggtgaactgattggccgtgggctattttatggtctgcatatgaccgcagggttagcaattgcaggttaacacaggtgcgcggggctacccgcgcgcaagtaaggaaagttgtaatgaatgacgtctcacaccgcgaatcgttcgcgttcagcgcccgggtactgggcgcgctgttttatttcgctccagacagcgagcagaccgcgccgctggtgagtgccctgaccgcaggtgactgggttcaggactggccgctggcggaggaaaatctgctgcctgtcgccagtatgtttaagaccccgtcggatgaagcgttgaaagacgcctggcagcgtctgtttattggcccgtatgccctgcccgcccccccgtggggctcggtctggcttgatcgcgagtccgtgctgtttggcgattcgaccctcgcgttgcgtcagtggatgcgtgaaaaccatatcgcctttgagatgcagcagaatgagcccgaagatcatttcggaacgttgctgatgctggcggcatggcttgccgagaacggtcgcgaaacagaacgcgaccagcttcttgcctggcatctgctgccatggagcacgcgtttccttagcgtattcgttgaaaacgcggcccatccgttctacaccgcgctgggtaaacttgcccagctgacgctggcggaatggcagtccactttgctgatcccgattgccgaaaaaacgctgtaccgataacagcacctggcttgtccacccgttgtgcaggccaggctcgcacatttttgctgcaacacaacgtcacaactgctatactgtatataattacagtatacgggggtgcacaatggctgttgaaacaaaatttgttgtcgtacgaaaaggtgaagaaaaaatgacatttgccagtaagaaagaggctgacgctcacgacaagctgctcgatatggcagaagcgtttaccgactggctgttgcaaagcggaatgcagatggatgaaacgcaggcggagaacctaggtctttatctcgccgagcagaaagagtccgtgcagcatatcctgcgtaccagcaagcttcccgagctcaatgctgaagcggataaaacagcatcagatgcggacagcagcaaaaaaaatccgggccgtcaaagccgcctgatcgtcagaacgtctaatcacctgtccttccgccgcgggccggaaacggctcgcggctttattaaggtcggctgaaccttatattcatcaaccgtaaccctgaaaatacgtcctgttatcttgatttgtccgcctcaacgtttacgctgatattcagcctttttgcttccatggttatcattgttttggccaggtccttatcgcccccgtgcactttatctatcagatcctgtacaagtgtcatcatcaggaagtttttatttgcaggatagaaatctgtcatagtgatcccgttatccttcaggcgctgatgcaccaccgtctctgtatctgcgattatttctgctactttctcatgcatgatctcgatctgctcgaaaacaatgcggttaatcatttcaatctgttctggcgtaaaattcggttccattatttcccctcgtcaggcgtatgttaaaaacacgtgaatcacacgttgagcgcctctgaatggtgcggtaaattatcacacaactcttgtaactcgttgatcagcctggccacatggaaaccgtcacagacagaatgatggacctgaacggcgaaaggcaacaagacctttccatcctggttatagtattttccaaacgtgaacatgggcgcaaaaaaattccgcatgttagcgacgttgacgttgaaactgctaaagctgacccacggaatatccgatatgaagaatatattttcccgggactcttccttaggccaataagcaaggatattgccatagcgggcgacatcttctgcataaacgcgctgaaaatggtgaatatttccatcgtaatgactccataacgatgaaaacgtctccgtttctttatggaaaagggtatagcttggatgaacctcattccatattacaagctcatcatccttcatggccatacggaattccggatgccggtttacgacgtcagaaataagggaaataatcgcaggataaaatttccagccaacctctttgatatgctttagcagcacggtaatgtccagctgaaccgtttggttaaatgtagattgagcaaagccctgaaatacttcaaagtgttcctttcttgcccaacgtgataagtcaactaccgtatattctggcattatttttgtcatttcagagccttagttgagctgcgctatataaaatagtagcgtatcacaaacgtaggggctgtatagaccgtagcgaagaggcaccctaaattttcagcgtatcaatcaccgctctcagcgccggggatacgttgcggtgtggataatagaggtacagtccgtccatccgcaggctgtagcgctgtaagacgcgtataagcgtgccacgctccagatcgtcagccaccagctcaaccgggacataggccagcccgagtcccagccgggccgcttcggcctccatgtagctgtcggaaaaggcccattgtccctccgggcggtgagtaacatgcttcccgtcctgaacaagctcccattgatagtggttaccgtcggcaaactggtaggcaatgcagggatgagcatccagatcggcgggcgtctgcgggaaaccatagcgccgaaaatgcgccggagcggcaaccacagccatctccatatcgggcgtgatgcgcacggcaatcattccttgtcccacctccggcccaagccggacgcccgcgtcgaatcgctcggcaatgatatccacgaaccggctctcattcatcaattccagacggatatccgggtaacgctgtttgaagatagcgagctttggcagcaggcatttttcgatggcgtgctggctggcattaatgcgcaccgtgccggatggcgtctggcggtaatgcgccagtctggtcagcccggtatcgagcgcatcaaaggctgaaccagcggtctggtaaagttgctccccggcgtgggtcagcgacagtttgcgcgttgtacgcaccagaagccgaacgcccagccgctcttccagctcgcgaaccgatcgactgatcccggattgtgccagcccgagccgttgcgcggctgccgtgaagcttccctcccgcaccacctggataaacagatacagctcattgtagttttcccgcttcgccatcatgcctcatcaattcataacaatatgatatcaatcctagcagcctttggcctctaatcagcactatttctgctaactataatgaccgcattacaacacacggtacctcttatgcaaacattcacccaaaaactgtccgttgcgctgctgctatgcgcatcattaagtggagtgacaacaatgagttatgcagaaacacgaaatcctgccgcccccgtttcgatggtgacaacctgggataagaccttcgccgagagcaataaagtcgaccaccgcaaggtgacgttcgagaaccgatacgggatcaccctggtcggcgatctgtacattcccaggaacagcggcgaccagaagctggcggcgattgccgtcagtggaccattcggtgcggtaaaagaacaatccagtggtctttacgcccagactctggctgaacaggggttcgtgaccctggccttcgacccatcctacacgggtgaaagcggcggccagccgcgtaacgttgcctcccctgacatcaacaccgaagactttagcgccgcagtggatttcctcggattacagaaagaagtcgaccgtaaccgtatcggcattctcgggatctgcggctggggcggtatggcgctgaacgcggcatccatggatacccgcgtgaaggcggtcgccaccagcgtaatgtacgatatgagccgcgcgatgggtcacggcgtgggcgacgggagagatcgttattcagcggccgatcgccgggccgtgttgcagtatctgaacgcgcaacgctggaaagatgctgaaagcggcaccttcgcccatggcggccacgatatttatgtcgatgaaaacggtaaggtaacggcggccgggcgtattctgccggaagcattgcccgccgatccgcatccggtactgaaagagttctatgattactaccgtatgccgcgcggcttccatgcccgttccgtaaactccaccggcgcatggaccgcgaccatgccgttgtcctttatgaatatgccgctgctgagctatgccggggagatcaccatcccaacgctgattgtgaccggtgaaaacgcgcactcacgttattttgcggaagatgcgtttaaagctgtcggcagcaaacagaaggaactggtgattgttcccggtgcgaatcacgttgatctctacgataacgtcgcagggaaaatcccgttcgcgcagttcgggcagtttttcaaaaccagtctggattaattctcttagcccccggcaatcagggggcttatcttctcttcgccgtgaattacacctatgtccacactgaatcaaacctcatcccgtgatgctgagcgtgcacactggggcggtatttttgccatgaccctgtgcgtttttgtcctcattgcctcggaatttatgcccgtcagtctgctcacgcccctcgccagagatttaggggtgacagaggggacggctggccaggggatcgccctctctggtgcgctggctgtcctgaccagcctttttctttcccggcttgccgggaatatgaatcgcaaacatcttctttcaggcatgaccgtcctgatggcgctgtcagggatcattatcgccttcgccccaaacgctttgatgtatatggcaggccgggcgctgatcggcatcgccatcggcggtttctggtcgatgtctgctgccaccgccattcggctagtgcctcagcatcaggtctctcgtgcgctggcgatttttaacggcggcaacgcgctggcgacggtggtagccgccccgctgggcagttatctcggctcgaccattggctggcgcggcgcgtttctttgcctggttcccgtggcgattgtggcgttcatctggcaatattttagcctgcccaacatgggcgggaaccagcggccgtcgccacataaaagcgtatttcgcctgctccaccagcctgcggtttcggtgggtctgatggcgtgcggcctgttcttcatgggacagtttgcgttatttacctatgtgcgccccttcctcgaaaccgtcacccacgtcagtccttccggcttatcgctgatcctgctcactatcggtatcgcaggtttcatcggcacgctgatcgtcgcgctggtcctgaatgccgcgttttacctcaccttaatggccataccgctgcttatggcactgattgcaggggtattaatgctcaccggggacagcctgtggatcgtggccctgctgttaggtttctggggaatgctggcaactgcggcccctacgggctggtggacgtggatcgcccgtacgttaccggaagatgccgaggctggcggcgggctaatggtcgcggtgatccaactctccattgcgcttggctcaacggcgggtggcgtggtgtttgatacctttggctggcagagcaccttcgctttaagcagcatattactcctgagtgcaggggtgctgacttttacgacgtcgcgccatcggaaataaggcattatattaacagggttgttttatttaattacaaaacctcgctcacctcccgtagaaataataattaagcaatatcctggtcagccagcgacatcgctttgttagcttgagcattcaggcaaagctcaaaccggaggtattctttgctgattaaattaaagaaagaacgaacgcatcaggaggatcgtcgtcttgctctctggctggcgacctccgcaggactgctgaatgccattgcgctgggcgcgttcggtttttttccctcgcatatgacgggcaatacctcgcagctatccagcgaagtttcctccaccgatctcagcgatattcttttctttggtgccattattctttcgtttgtctcaggtgccatcgctgcgcggattattgttatctgggggattatccataacgtcaggctggtattcagccaggttctgtttgttgaagggctattactggccggggtatccctgtacgaaatgtattttcactccttcgccacgaatcaggagattattattttcctgtgcgggttgatgggaattcataattccacctccactcaactatccggcggtcgggtgagatccacgcacatcaccggcacgctgaccgatgcgggcatttcgctggcctccgttatggtcgccatgctgcgccgggattactccaaagatacggccgcgcaaaagagtcagctcaaaacccatttaactacccttttctcctttatcagcggcgggatcgcggggctgatcctgttcagagagtttggattccacgcgatgctggcgctgggcctgttgctggtaatcgtcgccgccttctctatcgtccgcatttcgtggcgcgtacgcaaggtgcgcgccgcgctcagtcgacaggtataatcagcacgccttatgtgacgttgtcacgtaaggcgtgcttctttaagactattctgcctgcccactgacagcccttatgccataaggcttcactcaggttgtcactaatttcatagggttactgatttacccccttcgctggaacccttccgtttcgcttgctataggtgaagtacccctgccgaaacatggcataacaacaggcaaccggtggttgctataacgcatgcgcacagggagacacaccgcaatgcacccattacttaaacgttcgctgctttttgtcggcgcgattatcgtggttctcgctctcctcacctggggaataggactggaaacgattaaggcgcgccaggttgacctgatttacctcgggcaacagcacctgattctggtcttttcatcaatgttctttgccctgctggtgggcattccaagcggtattctgctgagccgtccggccgcgcgtggtatcgccgaatatgtgatgcaaatctttaacgtgggcaacaccctgccgccgctggccgttctggcactggcgatggtggtgattggcatcggtgataaaccggccattatcgccctctttctggcctctctgctgccgattgtgcgtaacacctatgccgggctgtgctctgttcccgcgtcgttgctggaagcggcaaacggtatcggcatgaccaaatggcagcgcctgcgtcaggttgagatccctaacgcgtggccggtgatgctttccggtattcgcattgccactgcgattaacgtcggtaccgcaccgctggcattcctgattggcgccagcagctacggcgagctgattttccctgggatctatctgaatgattttccgacgctgatcctgggcgcggcggccaccgccctgttcgccctgattctggatacgctgctggcggcactgggccgattactgagcccgcatctcgcgcgataattataacaaggagcttctatgagactgttttccggcctgacggcgctatgcgccgccgcgctcttcaccagccaggcgctcgccgcaccgctgatcctggcaaccaagagctttaccgagcagcacattctctcggccatgaccgtgcagtatctgcaaaagaaagggtttcaggtacagcctcagaccaatattgcaacggtgatttcccgtaacgcgatgatcaacaagcagatagatatgacctgggagtataccggcacgtcgctgatcatcttcaaccacatcaacaaacgcatgtcgccgcaggaatcgtacgagacggtgaaacgcctcgatgcgaagcacggtctggtgtggcttaaacctgccgatatgaacaatacctatgcctttgccatgcagcgcaagcgcgccgaggctgaacatatcactaccatgtctgagatggtggcaaagattgagcagatccgtaaaaccgatccggataacaactggctgctgggccttgacctggaatttgccgggcgcagcgacgggatgaaaccgttgcaggcggcctacaacatggagctggaccgcccgcagatccgccagatggatccgggcctggtctataacgcggtgcgcgacgggtttgtcgatgcggggctgatctacaccaccgacgggcgcgtaaagggcttcgatcttaaagtgctggaagacgataaaggcttcttcccgagttacgccgtgacgccagttgttcgaaaagacacgctggaggctaatccggggctggaggaggcgctgaacaccctttcagcccagctcaataacgacgttatcaccgaactgaataagaaggtggatatcgatcatcagtcaccgcagcaggtcgcccgtgatttcctgcgtagcaaacagttgctgtaggaggcgctatggagacgattcactatattctcgacaactgggactatctcttaaccctgacgctgcaacacctgtggctggtggcgctcgccgtgggcctggcgatttttattggcgtgccgctgggcattttaattgtccgccataaatggctggcaacgccggtgctggggattgccaccattgtgctcaccatcccgtcaattgcgcttttcggcctgatgatcccgctcttttcgctgatcggtcagggcattggcgccctgcccgcgattacggcagtgttcctctattcgctgctgccgattgtgcgtaacacccacacggcgctcgacagcctgccgccgggcctgcgtgaagcgggacgcggcatcggcatgaccttctggcagcgtctgcgctgggtggaaatcccgatggcgttgccggtgatttttggcggcatccgcaccgccgtggtgatgaacatcggcgtcatggcgattgccgccgtgatcggtgcgggcgggctgggcctgctgctgcttaacggtattggcgggagtgatattcgtatgttgattgcgggcgcgctgatgatttgtcttttagcgattgtgctcgactggttgctgcaccgtttgcaggtggtactgactccgaaggggattcgataatgataaaactggaaaacctcaccaaacaattttcacagaagcacggccagacgtttaaggccgtcgacaacgtcaacctgaacgtgcctgaaggggaaatgtgcgtgctgctcggcccgtccggctgcgggaaaaccactaccctgaagatgatcaaccgtctcattacgccaagcagcgggacgatcctgattaacggcgaagacaccagcggaatggacactgtgaccctgcgtcgcaacattggctacgtgatccagcaaattggcctgttcccgaacatgaccatcgaagagaacattaccgtcgtgccgcgcatgctgggctgggataaagcgcgctgtaaatcccgtgccgaggagctgatggatatggtggcaatggatccgcataaattccttcaccgctatccgcgcgaaatgtccggcggtcagcagcagcgtatcggcgtcatccgcgcgctggcagcggatcctccggtcctgctgatggatgaaccgttcggcgcggtcgacccgattaaccgtgaggtgatccagaaccagttcctggagatgcagcgcaagctgaaaaagaccgtgatgctggtgagccacgatattgacgaagcgctgaagctgggcgaccgtattgccgtcttccgtcagggacgtatcgtgcagtgcgccagcccggacgagctgctggcgaaacccgcgaatgagtttgttggctcgtttgttggtcaggaccggacgttgaaacgcctgctgctggtatcggcgggcgacgtcaccgaccagcagcctaccattacggtacgcgaatcgacgccgctgccggaggccttcgccaccatggatgacaacgatattcgcgccattaccgtggttgatgagcacggcaaaccgctcggctttgtgaagcgccgcgaagcgcgtaacgccagcggcagctgcggggatattctgcatccgttccgcatgacgggtaaggccgaggataacctgcgcgtggtgctttctcgcctgtatgagagcaacaccagctggatgccgattgtggacgaggacggacgctataacggcgaaatatcccaggattatattgcggagtatttgagctcagggcgtacgcgccgggcgttgaatattcatagcgagagttaagcattcaggccgggtactgcccggcctttttccgcacgcataccttttgctaacctcccgatttaccgccacaatattgtatcgtccccgttaaatcacgacttcatgcaacgtcttcacgcttaccccgacatccgcgcgatgtttcgtcgtctcctgattgctaccgtcaccggcgtgctggcggcgctggccgttgcggtgttccgccacagcatgtatctgctggagtggctatttctcagcaacgaaagcggaagtctggtgaacgccgcagccgcgttatcgccctggcggcgggcactgacgcctgcgctgggtggtctggccgcgggaacgctactgtggggatggcagcgcatgacggcacaacgtccccacgcccccaccgattatatggaagcgcttgagacgggtgacggccagtttgattacggcgccagcctggtgaaatccctcgcgtcgttgctggtggtcgccagcggcagcgccatcggccgtgaaggcgccatgatcctgcttgccgccctcgccgcctcctttnnnnnnnnnnnnnnnnnnnnnnnnnnnnnnnnnnnnnnnnnnnnnnnnnnnnnnnnnnnnnnnnnnnnnnnnnnnnnnnnnnnnnnnnnnnnnnnnnnnnnnnnnnnnnnnnnnnnnnnnnnnnnnnnnnnnnnnnnnnnnnnnnnnnnnnnnnnnnnnnnnnnnnnnnnnnnnnnnnnnnnnnnnnnnnnnnnnnnnnnnnnnnnnnnnnnnnnnnnnnnnnnnnnnnnnnnnnnnnnnnnnnnnnnnnnnnnnnnnnnnnnnnnnnnnnnnnnnnnnnnnnnnnnnnnnnnnnnnnnnnnnnnnnnnnnnnnnnnnnnnnnnnnnnnnnnnnnaaactgtggatcgcctgcggtgccgccgccgggatggccagcgcctatcatgcgccgctggcgggcagcctgtttatcgcagagatcctgtttggcacgctgatgctggcctccctcggcccggtggtgattgctgctgtagtggccctgctgaccacgcgcctgttaagtcccggcgcgaatacgctatatgatgtctatctcagcgagatgcttacggcggtggattatttcctgatcgttggcgtgggtctgctggctggcgtttgcggcccgctgctgatgtggctgatggcggccagccacaggctgtttctgcgtctcaaactttcaccgccgtggcagctggcactgggtggtctgatcgtcgggctgctgtcgctgctaacgccgaaggtgtgggggaatggctacagcgtggttcaggcgtttttgcattcgccgccgctgctgtcggtgattgccggcgtctttatttgcaagctgctggcggtgctggcaagcagcgggtccggcgcgccgggaggcgtgttcacgccaaccttgtttgtcggtatggcaacgggaatgctgtttgcgcagatctttgcgctgtggtttcctggctctgagacggcgatcctgcttgggctggcgggtatggcgacgctgctcgccgccacaacgcatgcgccaatcatgtcggccttgatggtctgtgagatgaccgggcagtattttttacttcccggtttgctggttgcctgtgttgtggcgtcggtattgtcgagaacgctacgccacgactcgatctacggccagcataccgccgaaagccgagagatcgatgtagtgcgctaattcgcgctgctcggcgcggggcagataaggcagttcgcccaccagcgggccaggcagctttttgctcagcacatcgatgatttcagcgtagtgcgcaaggcccgggttaatacggttcgccacccaaccaatcagcggcaggccgtcattagcgatagcctgcgccgtcagcaaggcatggttgatgcacccttcctgaatgcccacgaccataatcaccggcaactgctcctgcaccacccattcggaaaggggacgtaaatcgttcatcaggctgcgccagccgccggtcccttcaacgacaacgtggtcaaccttttcactcagatttgccaggccatcagaaagcaggctgtagttgataagcccactgtgagcgacgctgctttcctcttcgcttaaggcgataggattaacggcatcataaggcagttccagagacgagacgctttgcagaaccagggcatccttattgcgcagcccttctggcgtctctttactgccttttgcaaccggcttgtatcctgcaacgcgtttaccgcttgccgccagggcctgaagtaacgcgcgggatacgactgtcttcccgacagacgtatccgtaccagtaataaagaaacgcttaagcatgactcattccacctcttgggtatgcctcaaaatataaaccaggtaaataattcagtggggaaagtctacgggatgcgtgcgctaccgggcttgagatagcgcaatttttcgtacatctctggaaaagagttagccctgtagcaaacgaatcagtaacgagccgttgtacatcgcatcttttaccagcgcggcgccggccatcgtaccctggttggaaaattgcgtactttcgaccacgatgtttttactgtacgcgggaagcgcctgctgattgatgcaggcggaaatcgccggaaagaggatatccgccgcctggctgagcggggagccgatcagtattttttgcgggttaaacaggttcaccataatggccagaatgcgcccgacattattgcccacgccggtaataatgtccttcgccagcagatcgccctgccttgccgcagcgcacagtgcctcgacgcttaacggttgaccgtgcagcgtggagctcatcgactggctgagccgcacctgcgccagctccagcacgctttcgacgctggcaatcgtctccagacagccatggttaccgcagtagcagcgttttccgtacggatcgacctgcgtatggccgatctccaccaggctactgctgccagcatgcaacagacgcccgtcggtgatcacacctgcgccaacgttatgatcaatcaccacctgaattacgtcgcgcgcgccccgggaggcaccaaacaatgcctccgccatcgtccaggcgctgatatcatgctgaatgtagaccggcacaccggtgtggttttccagcacgtcgcccagcggcatctctttgacgttttcataaaacggcatgcggtgcacaatgccattttcggtatcaataattcccggcagggtgatcgcaatcgccgttaaacgttcaagacgctgctggtgacgaataaagaactggtcgatgtgggtcagaatggcatcgagaagtggttgctctgcattaagcgggagttccagccggtcctccaccaccagcttgctgctgaggtcgcgcagcgcgaggaagatttccccgcggctaatccgcagcgacaggtagtgccaggcttccgtttccaccaccagccctaccgccggacggccacggctgcccggctcctgaatttctgtttcctgaaccagatgggcttccagcatttcgcggacaatcttggtaatactggcgggtgccagttgtgccaggcgcgaaagatcgatacgcgaaaccggaccaagctgatcaatcaggcgataaacggcacccgcgttggtctgcttgatctgatcgatatgccctggctgactatcagcaaccacctcgtactcccttattttcgagcttcgaaataaactgagggctatggtgaagcacttcaatggctgacgtcaaatttttacttagccatgtgatttactgcacattttcgcccacttttccctataaataatgcccgcgagaagcggtaattaattgttctttgaaacgctgtgccgcatggctctgttcatgatgtttagaccacaccagccacatctctgagactgcatcctgctcggctatcttcacccagcgcatttccgccagttgtacccgtttaaatgaggccgggagaatcgacacgccaagccctgcggcaacgagaccaatgatcgtcatggcttcccccacctcctgcgcgatagtcgggacaaggccatatcgccgcatcagaccaagaatatcgtcatacaacccggtacccacctgtgggtcaaaaaagacaaacggctctttcgccagttcagccagcgagacgctgtgctgcgcggcgagcggatgatcccgggggatcatcgccatcagcggttcgcggaggatcacctgccacgccagggtatcaggcaactgcgtgttacgcatcagccccaggtcgagcgatccttcgttaagcggcgatatctgctcccgggtatttatttcgcgcgtctgaatatgcacatccggaaagttacggcgaaacgaggatagcgtttgtgaaacagcgctgataaagggggccgatgaggtaaacccgatgcgcagctcccccgtctccccaagataaagccgttccgctctggcggcggcgtcctccaccatactcaggatctgccggctatcggcgagaaactgttttcccgccgccgtcaggctcacgctgcggttggttcgcgccagcagacgcgccccgacctgctgctccaggatctggatctgctggcttagcggtggctgagagatattcagccttgccgccgcacgaccaaaatgcagctcttcggcgacggcgacaaaatagcgcagatggcgcagctcgatattcatatttnnnnnnnnnnnnnnnnnnnnnnnnnnnnnnnnnnnnnnnnnnnnnnnnnnnnnnnnnnnnnnnnnnnnnnnnnnnnnnnnnnnnnnnnnnnnnnnnnnnnnnnnnnnnnnnnnnnnnnnnnnnnnnnnnnnnnnnnnnnnnnnnnnnnnnnnnnnnnnnnnnnnnnnnnnnnnnnnnnnnnnnnnnnnnnnnnnnnnnnnnnnnnnnnnnnnnnnnnnnnnnnnnnnnnnnnnnnnnnnnnnnnnnnnnnnnnnnnnnnnnnnnnnnnnnnnnnnnnnnnnnnnnnnnnnnnnnnnnntacattttcctaccctaatcttgtggtcatacccgtcaccagaaaccacggggatgtttaagcaaggattatgtgtgagccgtacaacgaccgttgatatcgcgccggccagcgacattgatgatttacccgcagcaccgcagccggttcagtttattaaacgtggtaccccccagtttatgcgcgtcacgctagcgctcttctcagcgggtctcgccacttttgccctgctctactgcgttcagccgatcctgccggtcctgtcgcatgaatttggcgtgtcgccagccagcagcagtatttcgctctccatttcaaccgggatgctggcgatcggtctgctgttcaccgggccactttcggatgccatcggacgtaagcaggtcatggtaacggcgttaatgctggcctccgtgtgtaccttgctgtccaccatgatgaccagctggcacggcattctggtcatgcgcgcgctgattgggttatccctcagcggcgtggcggcggtcgggatgacctatctcagcgaggagatccacccgagcttcgtggccttctccatggggctgtacattagcgggaactctatcggcgggatgagcggacgcctgctcagcggtgtgtttactgatttctttaactggcgcattgcgctggccgttatcggctgcttcgccctcgcttcggcgctgatgttctggaaaatcctgccggaatcgcgccatttccgcccgacctccctgcgtccgaaaacgttatttatcaactttcgtctgcactggcgcgatcaagggctgccccgtttgttcctgaccggtttcctgctgatgggctcgttcgtgacgctgtttaattacatcggctatcgtctgatgctttcaccgtggcattttagtcaggcattggtgggtttgctctctgtggcatatctcaccgggacatggagttcgccaaaagcgggcgccatgaccgcgcgcttcggtcgtggtccggtgatgctggtttccaccgccgtgatgctgttcggactgctgatgacgcttttctcttccctgtggctgatttttgccggaatgctgctcttctctgcgggcttctttgccgcgcattccgttgccagcagctggattggcccacgcgcgcgccgcgccaaaggtcaggcttcgtcactgtatctgttcagttactatcttggttccagcatagccggtacgctcggcggggtgttctggcacaactacggctggaacggcgtgggcggatttatcgcgctgatgctgtgcgctgcgctgctggtgggcgcgagcctgcataaacgactgcattaacattcagccctcttcgtgtttaaatcgagccgatgctaatttttgtcatcggctgattcagacacgaggacttcatgaaaaacaataactatcaacaactcacccgcaccttccagcgcctctcccgcttctcgcacctctcctccatcgccagctgggacatgttcaccatgatgccgccaggcggcagcgccgcgcgcggtgaagcgctggcggagatgagcgtcctgcaacatcagatcctgaccgataaaaaagtgggtgaatggctggcggcggcggcagacgaagatctgaacgacgttgagcaggccaacctgcgtgaaatgacgcgccactaccagcaggccactttactgccggaatcgctggtggaggccaaatcgctggcgggcagcaggtgtgaacacgcgtggcgcactcagcgtccggccaacgactggcagggcttttcagccaacctgaaagaggtggtgaaactcagtcgtgaagaggcccgcctgcgcgctgaggctaaaggctgcacgccttacgacgcgctgctggatatctttgaacccgacatgaccagcgctcgcctggatgtgctgttcggcgatctgaagtcctggctgccggagctgctggcaaaggttgtggaaaaacaggctcaacgatcgttcgttccgccacagggtcccttcccgaccgccacgcagcgcgagctgggcctggaagcgatgaaaatgcttggcttcgattttaacggcggtcgtctggacgttagcgcccacccgttctgcggcggcgtgccggaagatgtgcgtatcaccacgcgttacgatgaagatgaactgctcagcgcgcttttcggcgtgatccacgaaaccggacatgcccgctacgagcaaaaccttccgcgagcgtgggccggccagcccgttgcgctggcgcgctctacggcgatccatgaatcccagagcttgttctttgaaatgcagctgggccgcagcgacgctttcctgaagcatctgcttccggcggttcatgcccgtttcggtagccaggcggcattcagcgaagagaattttattgcctggaaccagcgcgtgaagccgggctacatccgcgttgatgcggatgaagtgagctatccggcgcatgtggtgctgcgctatgagatcgagcgtgcgttaatcaacggcgaaattgaagtcgatgatattcccgcgttatgggatgagaaaatgcaggcctggcttgggttatccaccaaagataactaccgcaacggctgtatgcaggatatccactggaccgacggcggttttggctacttcccgtcttacacgctgggggcaatgtatgcggcacagctgttccatgccgccaaaactgcgctgcccgggttgcaggcatccattgccgggggcgatttctcggcgctgtttgactggctgcgtcagaatatctggcagcacggcagccgtttcagcacgtcgcagctcatcacccaggctacaggtgaagatctgaatatccgctacttccgcgaacacctgacgtcccgctacctgtaaccgaacgcgccgggggtccaccctggcgttgtacatatggttacacgccgataccaatcgctcacggaaaccccgaatttacagggatatagttatttcaacggccccgcagtggggttaaatgagaaaccaaattcgagggtatgaaaatgaaaaaagtattagctctggttgttgccgctgctatgggtctgtcttccgctgcattcgcggctgaaactaccgccaccgcagcgcctgcggcatccaccgctgctccggccaaaacggttcaccataaaaaacatcacaaagcggctaaaccagcggcagaacagaaagcgcaggccgcgaaaaagcaccataaaaaagcggcaaaacctgcggtagagcagaaagcccaggcggctaaaaagcatcacaaaaaagcagcaaaacacgaagcggctaaacctgctgcatagccagcagcgtaagagtacaagcttaaccgtgcccttcggggcacgttggtaaaccggcgctgaacgggtttgcggtcagcgccgttttttttatccggagggcgtatgctgcggcgctatcggtttgagttcattcttatcctgctaattttatgcgcgctcatcgccagccacttttatctttcctgaatgtagcacgctgattttactcccactttctcgccgtcgcgtctatagtattttcatagggttcacttttaataatcataattacccccaccagagtgtgatatgcgtaaatctgttgtgttgttactgggaacgtttagcctttttgctggcttttcatatgcggatgatggcgacgatgacgccattagcgccaaagaggtaaagacgctgttttttggtcatgacgatcgtacgcgtgtcaccgatcctaccgaatcgccctgggatgccatcgggcaactggaaaccgccagcggcaatttatgtaccgcaaccctcattacgccacgccttgcgctgacggcgggtcattgcctgttaatgccgcctgaaggcaaaccggataaagcgatcgccctgcgctttgtgtcgcaaaaaggaatatggcgctacgaaattcacggtattgaggggcgagtggatccgtcgcttggcaaacgcctgaaaccggatggcgatggctggattgtgccgcccggggcggcctcctgggatttcgggctgatcgttttacgttatccgccgtccgggatcaccccgctgccgctctttgatggcgataaggccgcgctcaccgccgccctgaaagccgccgatcgaaaagtgacgcaatcaggttatcctgttgatcacctcgattcgctgtacacccatacggactgcgtggtgacgggttgggcgcaaaacagcgtactgtcgcatcagtgcgatacgctaccgggtgatagcggatcgcccctgatgttaaaaaccgataacggctggcagctgattggcgttcagagttctgcgccagcggcgaaagaccgctggcgcgccgataaccgggcgttgtcggtgannnnnnnnnnnnnnnnnnnnnnnnnnnnnnnnnnnnnnnnnnnnnnnnnnnnnnnnnnnnnnnnnnnnnnnnnnnnnnnnnnnnnnnnnnnnnnnnnnnnnnnnnnnnnnnnnnnnnnnnnnnnnnnnnnnnnnnnnnnnnnnnnnnnnnnnnnnnnnnnnnnnnnnnnnnnnnnnnnnnnnnnnnnnnnnnnnnnnnnnnnnnnnnnnnnnnnnnnnnnnnnnnnnnnnnnnnnnnnnnnnnnnnnnnnnnnnnnnnnnnnnnnnnnnnnnnnnnnnnnnnnnnnnnnnnnnnnnnnnnnnnnnnnnnnnnnnnnnnnnnnnnnnnnnnnnnnnnnnnnnnnnnnnnnnnnnnnnnnnnnnnnnnnnnnnnnnnnnnnnnnnnnnnnnnnnnnnnnnnnnnnnnnnnnnnnnnnnnnnnnnnnnnnnnnnnnnnnnnnnnnnnnnnnnnnnnnnnnnnnnnnnnnnnnntcatgccggcgagcagtaataccagccctatccagcctttattgtttaaacgctgcccgaacataatccagcctgccgccagggtggcggcaataccgaagcccccccacagcgcataggccacggacagatcgatgcctttcaccgcctgcgacagggcgctaaacgcccccagaaccgcggcaatcgataacaggccataggctttgcgacgaaaaccgtcggagaacttcagaaagacgttggcaataatttccagaacgatggcgaaagccagccaggccgcgtggatccattcaaactgctgcatgggtctgctccttctgctgttttgccggtttgcgtgtacccgatttaatcagcacgatacctgcgaccagggtcgtcagcccggcaattttcattgtcgtcagggtttcatcaaataacatgacgctaaacagcgtaatcaataaaataccaataccttcccacaatgcgtatgccacgcccagcgcgatttttttaaccgcaaaagagaggaaaatataggaaagcgtaatcatgaccagcatcaaaataaaaccggtgctgccatcactcacgcttgcccatttcatcgacaaggtgccggtaatttcagcgacgatcgccagagctaataaaatccagtaaaacatgttttttctcctgcttgagaatataatccatcgaggctcgctgcggacagcaaaccaaaaaattgggaattaaatcagttagctaagcgcatagcgctagctcaggcagaagacgtgactatagcgcggaacgccagtgttgctcaccagaaagcaggcagagggaggttgaaaacagagcagagttgtttgaaaaatacgtcctgaacaaattgtccataaaattacaattatccgcggtgttgcttctcgtctttgcggatgaaaattgtcctcggtagttgaacacgcctgatttgtatcataagccaggaatttactcaaagccttttcatttctttacccagtctgtttgattttggttagtttttttaatccgctttcccctctattataaataaaaaactgttcaggaacgtccatggccaaacctattatcaccctcaacgggcttaagatcgtcatcatgctgggcatgctgatgatcattctgaccggcgttcgttttgcggccgatatcatcgtgccttttatcctggcgctttttatcgcggtgatcctcaatccgctggtgcagcgaatggtgcggctacgcatcccgcgtgtgctggcgataagcctgcttatcagtattattatcgttgcgatggtgcttttagtcgcctatctgggaacctccctgaacgagctggcgcggacgctaccgacataccgctcttccctggcgaccccgctgctgcaaattgaaccctggctgcaacgcgcgggtatcgaagtctcggttgaggaactgcttaaatacatcgatccgaatgccgccatgacgattgtcaccagcctgctggcacaactctccaacgccatgacctcgattttcctgctgttcctgacggttgtgtttatgctgctggaagttccacagctgcctgcaaagctccagcacatcatggtgcgtccggtagagggaatgggcgccattcagcgcgcgctcgacagcgtttcacgctatctggtgctgaaaacggccatcagcctggtgacgggattagtggtctgggggatgctcgccgcgctggatgtgcgttttgcctttgtctgggggctgctggcctttgcgctcaactatattcctaacatcggctccgtgctggcggcgatcccccctatccttcaggtgctggttttcagcggtttgtatgatgccctgattctgctggcaggctatctggtgattaaccttgtcttcgggaacattctcgaaccacggataatgggacgcggtctggggctttcaacccttgttgtgttcctgtccctgattttctggggctggctgctcgggcctgtcggcatgctgctctccgttccgctgacaattattgtcaaaattggcctggagcagaccgccggtggacaaagtatcgctgtactgctgagcgacatgagccataaggccgattaattgtccatcgacagcatgggcttacccgttcttcccgcttcgcgatagttgcccactgcctgctgccattccgacagcgggtagagggtgacatcgctgcactggctggcgcgcagtttaggccagatgcgccgaaactccgcctgccacgcctcagcgctcagcgcgtccagatagttacgaatgtgaaaccacgccacgcgcggcaacggccgctgctgccggaaggtctgcccggagagtagcccgtagcagacaaaggtgccggtttcgggcatcacgctcaggatcgtctccgccagactgccgcccgtggcgtcgtacaccacctccgcttgcgcggcggcagcattgacggcggccgtatcatgttgcgcaatcgggacgatccccatttcagccagacgttgagcgtgcacgggcgagcgatggatcccgtaaaccgcctctgcacccgcctggcgtgcccattgcccgagcagaacggcgcagtcagaaccggcagcggtgagcagcaccgttttcccgaccggaggatagcggtccagcatcatctgtgcggcaagcgggttgatatacgcccnnnnnnnnnnnnnnnnnnnnnnnnnnnnnnnnnnnnnnnnnnnnnnnnnnnnnnnnnnnnnnnnnnnnnnnnnnnnnnnnnnnnnnnnnnnnnnnnnnnnnnnnnnnnnnnnnnnnnnnnnnnnnnnnnnnnnnnnnnnnnnnnnnnnnnnnnnnnnnnnnnnnnnnnnnnnnnnnnnnnnnnnnnnnnnnnnnnnnnnnnnnnnnnnnnnnnnnnnnnnnnnnnnnnnnnnnnnnnnnnnnnnnnnnnnnnnnnnnnnnnnnnnnnnnnnnnnnnnnnnnnnnnnnnnnnnnnnnnnnnnnnnnnnnnnnnnnnnnnnnnnnnnnnnnnnnnnnnnnnnnnnnnnnnnnnnnnnnnnnnnnnnnnnnnnnnnnnnnnnnnnnnnnnnnnnnnnnnnnnnnnnnnnnnnnnnnnnnnnnnnnnnnnnnnnnnnnnnnnnnnnnnnnnnnnnnnnnnnnnnnnnnnnnnnnnnnnnnnnnnnnnnnnnnnnnnnnnnnnnnnnnnnnnnnnnnnnnnnnnnnnnnnnnnnnnnnnnnnnnnnnnnnnnnnnnnnnnnnnnnnnnnnnnnnnnnnnnnnnnnnnnnnnnnnnnnnnnnnnnnnnnnnnnnnnnnnnnnnnnnnnnnnnnnnnnnnnnnnnnnnnnnnnnnnnnnnnnnnnnnnnnnnnnnnnnnnnnnnnnnnnnagccatcaatcacctgctccggggaaccccggctgataccaagctgtaatcgcccgccggagatgagatctgccgcgccagcatcttccgccatatacagcggattttcataccgcatgtcgatcacgcccgtcccgatttcaatgcgtttggttttcgcgcctattgccgccagcaaggggaatggcgaactgagctggcgggcaaagtgatgcacacggaaataagccccgtccgcgcccagctcttcggcggcgaccgccagatcgatggactgtagcagcgtgtcagccgcggttcgcgtgccggactggggtgacggcgtccagtgaccaaacgacaaaaatccgatctttttcatagtggagtatcctgataaagcattgcgttatccctactctacgcattaacgaatgagaataaatggtgattatttaacggaatgcttcaaataaactgacagaaatacgcaaatcgcacgctgccttcccgcagaggaggcattctcctgacatctcataatgggatatagtgtgaactattctctttttaacaggtaacatcagcaatggctctgatccccaaaaactacgcacggctggaaagcggctaccgtgaaaaagcgctaaaaatctacccctgggtttgtggacgctgctcgcgtgagtttgtttattcaaatcttcgtgaactcacggttcaccatatcgaccacgatcacaccaataacccggaagatggcagtaactgggagctgttgtgcctgttttgtcacgatcacgaacactcaaagtacaccgaagcggatcagtatggcaccaccgttgtcgcgggtgaggatgcgcaaaaagacgtgggtgtcgccacgtttaacccctttgccgatctcaaggcgatgatgaacaagaagaagtaatatcgacggcttcactgcccatacctgtcgtatgggcagtcagaaagccacatatgttgtattccagtcacaggttgaacaatgacacggctttaatatctgcctcagggttcacgcgttttactgcctctaaaaacgcagcgaagttttgattaaacaccgtcagattattataaaattgcacctgtttttcacgggttccctcaagataagtcacagaccagatccgcctgttatttatcactatcgagcctggtttaatttttatgatagtcgccagctcaattttacgggtgctgctctttataacctcgtataaatactgctcatcataaaagtaggttttacctgacgagccgccaaaccagacaggatgggttgagatttttttcattccccggttgtcggcaacgatgcgcgttggatgccgaatacgcctgacgaaaaagcgtatcagcataatcagtgccacaaaagacagcaccacaaaaagaacgttaatgctctcccgcatatttcgttacctgacatgcatagttataagtgaagaagtatacccaaatagtctggtcgtgataattacccttctacgcccgtacgccatgatgccttgttacccttgatctttgctatcaatatacaatactgtatataaatacagtattgattaacggtgatcataatgcagtttttcaccccacctggcgataccagagcgagctgaccatgtttgcactgtgtgatgtgaacgctttctatgcttcctgtgaaacggtttttcgcccggacctgaagggacgaccggtggtcgtgttgtccaataacgatgggtgcgtcatctctcgctccgctgaagccaaaccctttgtgaaaatgggtgaaccgtacttcaaacagaaagatctcttcaggcatcatggcgtggtttgtttcagcagtaattatgaactttacgcggatatgtccaaccgggtaatgaacacgcttgaagagatgtcgcctcgtagcgaaatatactcaattgatgagatcttttgcgatcttaccggcgtgcgtaattgtcgcgatctttccgactttgggcatgaaatgagagcgaccgtactgcaacgcacccatctgaccgtcggggtgggcatcgcacccacaaagacgctggcgaaactggcaaatcacgcggcgaaacgctggcagcgccagacgggaggcgttgttgatttatccaatgtggatcgtcagagaaagctgatggcggcgctacccgtcgaagacgtttggggggtaggacgtcgcatagcaaagaagcttgagatgatggggattaagaccgtcctgcaactggcagacaccgatatccggttcataagaaaacatttcaatgtcgtgctggagagaacggtgcgtgaattacggggcgaatcgtgtcttgaactggaagagtttgccccggtaaagcaagaaatcgtctgttcgcgctcgtttggcgaacgcatcacggaatatgacgatgtacgccaggccatctgtagttatgccgcccgggcagcagaaaaacttcgcaatgagcatcagcattgccgctttatctccgtatttgttaaaacctcgcccttcgcgcttaacgagccatattatggcaatagcgcgtcggtaaaactgctcaccccaacccaggatagccgggatattatcggcgcatcagttcgttgtctggatgcggtctggaagaacggccatcggtaccagaaagccggagtgatgctgggagatttttatagccagggcgtcgcgcaacttaatctgtttgacgacaacgcacccaggaaaaacagccaaaagttaatggatgtattagaccatctgaatgctgaaaatggccgtggcacgctttacttcgcgggacagggtattcagcagccgtggcagatgaaacgggaaatgctttcaccccgctacaccacccgctttgcggatctcctcactgttaagtgatattaacaattgctgctaagttgtaattttccccttgccggaccggacaaatcggttatcgtgccaggtaactttcgcagcaataaaagacagtgggatgcgctatggcgatttttgatggtcacaatgacctgttgcttaatttatggcttcaccatcgccaggatccggtaacggccttcttctccggcattgagaagggacacctcgattatccgcgtatgcagcaaggcggattttccggcgggctgttcgcgctgttcgtgccgccgcaggagtatatcgcccgcatggcgccacaatacgccagcgagccgtggcagccggtcgacattctctggcagcagctgacgatccttaagcagcttgtcgcccactccgatggccgggcgcgattgtgcctgagcgcggcggatatcgaacgctgccgtcaggataaagtgctggcgatggtggcgcatattgagggcgcgggcggttttgacggcgagggagacgatctacaggctttctataccgccggggtgcgcagcattgggcctttctggaacattgctaaccgttttggcaccggcgttaacggggcgtttcccggcagcccggacagcggcccagggcttaccgctgagggtatcgccctcattaagcacgctaacgtcctgaacatgctgattgatgtttcgcatatgaatgaaaaagcgttctgggataccgctcgtcattcctcttcaccgctggtcgccacccattccaacgcccatacgctgtgcccgcaaccgcgcaatctgaccgatcggcagctactggctatccgcgacagcggcggcgtggcaggcgtcaatttcggcaacgcgtttttgcgcgccgacggtaaacgcgatagcgataccccgctgagcacaatcgttcgtcatatcgactatcttattaacatcatgggtgacgatcatgtcgcgctgggctccgattttgacggcattacgttgcctgatgatttacacgatgtgagtggtttaccacggctaatcagcgcattgcgtgacagcggctatgatcaatttgtgctgaataagctgctgtggggcaactggcaaaaggtattgcaaaatgtttggcaacaataggttacgttgtaaacattaagttaattccttacatctttcgggttgagctttgccctcctgtgacgcattatttgatgaccatcacaaaactggcacaaacaatggcgttggtgctgcttttttaaagaggaaaaaacgatgtggaagaaacctgcttttattgatttacgtcttggcctggaagtgaccctgtacatttccaaccgctaatcgctctgcccgccatccgtgcgggcatttttgtttgactacctggcccatcttcatgtttattaaagtcctcggttccgccgctggcggtggtttcccccagtggaactgtaactgcgccaactgtcagggtttgcgcgacggtacccttcaggcgacccctcgcacccagtcgtcgatcatcgtcagcgataacggcaaagagtgggtgctgtgtaacgcctcccccgatatcagccagcagattgcccatacgccagaactgaataagaaagaggttctgcgcggcacgcatattggcggcattattctcaccgatagccagattgaccacaccaccgggctgctcagcctacgcgaggggtgcccgcatcaggtatggtgtacgccggaggtgcatgaagatctttccagcggattcccgatttttaccatgctccggcactggaacggtggcctgattcaccacccgatcgcgccgctcaccgcctttagcgtggaagcctgccctgatttgcagtttaccgctgtccccatcgccagtaacgcaccgccctattcgccgtggcgcgaccgcccgctgccggggcataacgtggcgctgtttatcgaaaaccgccgcaacggtcagacgctgttctacgcaccgggtctcggtgaacccgatgacgccatcctgccgtggcttaaaaaagcggactgtctgctgattgacggcaccgtctggcaggacgatgaactccaggccaccggcgtcgggcgcaataccggccgcgacatggggcatctggcgctcggcgatgaacacggcatgatggcgctgctggcctcgctgccggcaaagcgcaagattctgatccacattaataacaccaacccgatccttaacgagcagtcgccgcagcgtcacgcccttgcgcagcagggaatagaagtgagctgggacgggatgaacatcacgcttcaggactaactatgcacattcgcgaaacgctctcaccgcaagagtttgagcacgccctccgggcgaaaggcgcctactatcatattcaccatccgtaccatatcgcgatgcataacggcgaggccagccgcgagcagatccagggctgggtggcgaaccggttttactaccagacgacgatcccgctgaaagacgcggcaattatggcgaactgcccggatccgcacacgcgtcgcaaatgggtgcagcggatcctcgatcacgacggcagcaacggtcatgacggcggtatcgaagcctggctacagctgggcgaagccgtggggctcagccgcgaggacttaatcagcgaacgccacgtgctgcccggcgtccgtttcgccgtcgacgcttacgttaacttcgcccgccgcgccaactggcaggaggcggcatgcagctcgctcaccgaactgttcgccccgcaaatccatcagtcgcgtctcgacagctggccacagcactacccgtggatcaaagaggaaggctatttttatttccgcagccgcctcagccaggccagccgcgacgttgaacacggtctggagctggcgaagcgttactgcgatagcgcggaaaagcagaatcgnnnnnnnnnnnnnnnnnnnnnnnnnnnnnnnnnnnnnnnnnnnnnnnnnnnnnnnnnnnnnnnnnnnnnnnnnnnnnnnnnnnnnnnnnnnnnnnnnnnnnnnnnnnnnnnnnnnnnnnnnnnnnnnnnnnnnnnnnnnnnnnnnnnnnnnnnnnnnnnnnnnnnnnnnnnnnnnnnnnnnnnnnnnnnnnnnnnnnnnnnnnnnnnnnnnnnnnnnncaaactcgatatcctgtggtcgatgctcgacgcgatgaccatggcctacgcgctacagcgtccgccttatcacacggtcaccgacaaagcggcctggcacacaacccgactggtataagcatgcaaaaaaactccatcgtcgcctttcgtcgcggctatcgcctgcaatgggaagccgctcaggacagccatgtcatcctctatccggaaggcatggctaaactcaatgagaccgcggccgcgatcctcgaactggtcgatggccaacgcgacgcggcggccatcattgccatactcaacgaacggttcccggaagccggcggcgtggatgacgacgtcgtagaattcctgcaaatcgcttatcaacagaagtggattattttccgtgagccagaataaacccgccgtcaatccaccgctgtggctgctggcggagctgacctatcgctgtccgctacagtgtccttactgctctaacccgctggactttgcccggcaggatcaggagctgaccaccgaacagtggattgaggttttccgccaggcgcgggcgatgggcagcgtgcagataggcttttccggcggcgaaccgttgacgcgtaaagatctgccggagctgatccgcgccgcccgcgatctcggtttttataccaacctgatcacctcgggaattggcctgacggaaagcaagctcgacgcgttcagcgaggccggtctggaccatatccagattagcttccaggccagcgatgaagtgctcaacgctgcgctggcggggaacaaaaaagccttccagcagaagctggcgatggccagagcggtcaaagcccgcgattacccgatggtgctgaatttcgtcctgcaccggcacaatatcgatcagatcgataaaatcatcgagctgtgcatcgaactggacgccgacgacgtcgaacttgccacctgccagttctacggttgggcgttccttaaccgtcaggggcttctgccgacgcgggaacagattgcccgcgcggaacgcgtggttgccgaatatcggcaaaaaatggccgccagcggcaatctgaccaacctgctgttcgtcacccccgattattacgaagagcgaccaaaaggctgtatgggcggctgggggtcgattttcctcagcgtgaccccggaaggcacggcgctgccctgccacagcgcgcgccagctgccggtggatttcccgtcggtgcttgagcagagcctggaatccatctggtatgactctttcggcttcaaccgctatcgcgggtttgactggatgccggagccgtgccgctcctgcgatgaaaaggagaaggacttcggcggctgccgctgtcaggcctttatgctcaccgggaatgcggataacgccgatccggtgtgcagcaaatcgccgcatcatcataaaatcctcgaggcgcgacgcgaagcagcctgtagtgatatgaagatcggtcagcttcagttccgcaaccgtacccgttctcagcttatctataaaacccgggaactgtaacgataatgaccacccgcatcgtggaactggcaggcggtttacgcgcaacgctggtgcatcagccgcaggcgacacgcgcggcggcgctggcgcgcgtgagtgccggaagccatcacgagccaccgcgcttcgccggtcttgcgcatttgcttgagcacctgctgttccgcggtagccagcgctatcagggcgatgatcgactcatggcctgggtccagcgccagggcggcagcgtcaatgccaccacgctggctcgccacagcgcttttttcttcgacgttgccgccgataacctgtcctacggcgtcgcgcggctgcgggatatgttgcaggcgccgctgctttcaccgcatgacatacagcgcgaagtggctgtcattgatgcggaaaaccggctcatccagcaacatgattccgccaggcgcgaaacggcggcgcgccacgcgatggaagaacctgcggtttttcaccgttttcaggtgggtagcaaggagtctctcgggcaggacccggtatcgctgcaaaccgcgttgcgcgactttcatcgtcgctattatgtagccggacacctgcaattgtggctgcaagggccgcaaacgctggatgtgctggccgagcttgcccatacgtttgcgtcaggttttgcgtcaggaggcatgcctgaaaccgctcccccgttgcgtcttagcgctgaagcagattatcagctggcggtaacggagcgacccgcactgtggcgttgtccgttaatccgaaaaagtgacaacgtcactttatttcgggagtttttactggacgacgcccccggaagcctgattgccgggctacgggcgcgcggactggcagaagaggtagccctgaactggctttatcaggatgacgattacggctggctggcgctaacggttgatagcgaacggcccgaggacattgacccgcatattacccactggctacgggcgctacagcaaacgacggatgagcagcagcggcattattatcggctggcacagcagcgtttcagcgccctgccgacgctggagcagctgcgccagcgggcatttggttttgcgaccggcgcggcgcccgtaggtttttccgccttctgtgctgacttactggcggcgccagtctcgtatctggcctgcaaaaaaatnnnnnnnnnnnnnnnnnnnnnnnnnnnnnnnnnnnnnnnnnnnnnnnnnnnnnnnnnnnnnnnnnnnnnnnnnnnnnnnnnnnnnnnnnnnnnnnnnnnnnnnnnnnnnnnnnnnnnnnnnnnnnnnnnnnnnnnnnnnnnnnnnnnnnnnnnnnnnnnnnnnnnnnnnnnnnnnnnnnnnnnnnnnnnnnnnnnnnnnnnnnnnnnnnnnnnnnnnnnnnnnnnnnnnnnnnnnnnnnnnnnnnnnnnnnnnnnnnnnnnnnnnnnnnnnnnnnnnnnnnnnnnnnnnnnnnnnnnnnnnnnnnnnnnnnnnnnnnnnnnnnnnnnnnnnnnnnnnnnnnnnnnnnnnnnnnnnnnnnnnnnnnnnnnnnnnnnnnnnnnnnnnnnnnnnnnnnnnnnnnnnnnnnnnnnnnnnnnnnnnnnnnnnnnnnnnnnnnnnnnnnnnnnnnnnnnnnnnnnnnnnnnnnnnnnnnnnnnnnnnnnnnnnnnnnnnnnnnnnnnnnnnnnnnnnnnnnnnnnnnnnnnnnnnnnnnnnnnnnnnnnnnnnnnnnnnnnnnnnnnnnnnnnnnnnnnnnnnnnnnnnnnnnnnnnnnnnnnnnnnnnnnnnnnnnnnnnnnnnnnnnnnnnnnnnnnnnnnnnnnnnnnnnnnnnnnnnnnnnnnnnnnnnnnnnnnnnnnnnnnnnnnnnnnnnnnnnnnnnnnnnnnnnnnnnnnnnnnnnnnnnnnnnnnnnnnnnnnnnnnnnnnnnnnnnnnnnnnnnnnnnnnnnnnnnnnnnnnnnnnnnnnnnnnnnnnnnnnnnnnnnnnnnnnnnnnnnnnnnnnnnnnnnnnnnnnnnnnnnnnnnnnnnnnnnnnnnnnnnnnnnnnnnnnnnnnnnnnnnnnnnnnnnnnnnnnnnnnnnnnnnnnnnnnnnnnnnnnnnnnnnnnnnnnnnnnnnnnnnnnnnnnnnnnnnnnnnnnnnnnnnnnnnnnnnnnnnnnnnnnnnnnnnnnnnnnnnnnnnnnnnnnnnnnnnnnnnnnnnnnnnnnnnnnnnggtattaacgccgcaggctattgatgccctgcaacctgacgagatagtcgcgctatggcgcgagatgactcgccgtcgccgacgctggcgggtgcttttcacgggctgaccggaaccggagctttcttcctgtgcgtagttttagtcaaaaaaaaagccccgtactacgacggggccgggctgcttatttcgctgttatttatccagcgcgtaggcaatcacgtagtcaccacgatccggcgactggcgtgcaccgccggcagagatcagaatgtactgtttgccggttttcggtgacacatagctgataggtccgccctggctacccaccgggagacgcgctttccacacttcttcccccgtggaggaatcaaaggcgcgcaggtagtaatcctgggttcccgcaatgaagaccagaccgccctgcgtggccagcgtaccgcccagcgtcggcataccgacaggcattggcatacgcatttttaccccaaacggaccggtatcctgaacggtaccgaccggcacctgccagacgattttctgcgttttcaggtcaatcgcggagagggagccaaacggtggtttctgacacggaatgcccagcggtgacatgaaacggtttttgttgaccgaatacggcgttcctttcatcggaacggcgcccatcccggcgttcacggcttcaccgcctgtgtttgccaccgcgctctgcggatcttgtttaatcagctggacccacagacccagacgcatatcgttgacgaagatgtactggttgttcggatcggtggacagactaccccagttcattccccccagcgagcccgggaagctcagggaaatatcggttcccggtatcgtgtacagaccgtcataacgcattgatttgaagctgatacgacaggccagctggtcaaacggcgtcgccccccacatatccgattctttcagggtttccgcgccaatctgcggcattcccacagagcgcggctgcgttgccgggtactgttcacgtggaatatccgctggttttaccggaacctctttcacttcagtgagcggtttacccgtcaggcgatcaagaacgtaaatttgccccgctttggtgcccaccaccaccgcgggcttgttgccctctttcgtcgggaaatcaaccaggctcggctgcatcgggatatcgaaatcccagaggtcgttatgcacggtctggtatacccacttctctttcccggtagtcgcatccagcgcgaggattgaggtggcgtatttgtgatcttccggaatacggtcagcgccccacaggtcgacagaggaacttcccatcgggataaacacggtattcatcgacgcatcccaggacataggggcccaggagtttgcagagctacgtttgtagtgttcgcccggcttcagaacatagttcggatccggattacgcgggtcgaacgcccagcgcagctggccggtgatcacgtcataaccacgtataacgcctcccggcatatcggtgctgacgttatccgcaacgcggccgccaacgacaaccgtcgtacccgccagcgtcggggccgacgtcagcacgtaggtgggatctgacgcgtcgcccatcccttcatgcaggttaacgctgccgttagtaccgaagtccgggcagaacttgccgttatcggcgtctaacgcgatcagcttaccgtcgatggtgttcatcaggatacggcgctggcatgcagcgcccggtgccacctgcgctggcaggaccggcgtggagccggctaccgttggctgcgccagcggtttggtggcatcgaagtacgccagaccacggcagcgcatccagattgcagacttggcgttgatttccgctttccagatctctttcccgctatcggcatccacagcgatcacgttgttatgcggcgtacagaggaagacacgatcgccaacctgtagcggcgtttgctgatcttctgcgccattgccgtccggactttccggtacgtcaccggtatggtaggtccagaccggtttcaggtttttcacgttgtcacgggttatctggtccagcgccacaaagcgactaccgccagccgtattaccgtagtgatcccagttctgctgtttcgcatcatcttttaccggcaccagcgggcgtttttcaccgctaaacggcacggtcggatggggttgaaacatctgaacaaaggtgacgcccatggcgacaataaggaccgcgcagacccccagggccccttttgcgcaggacggttttccttcacgtttacgcaatgcaggccaggtggcggctgccagcaccatcagcccggcgggtaccattaaacgggaaaccagcggccagaagtcgagcccggcatcgaaaaatgcccaaatcagggtgccaagaaacaccagggcaaacagccccacggcagaggacttgcggcggaagaactgaatcgcagagagcagagtgataaccccggcgatgagaaaataccaactcccccccagggaaaccagtttaaaaccgccgatggcaaaaaagagccccgttacaagaagtatcacacccaccagcaggcaccacgggcctaaccagccggatgggcggggattattgtctgacataaaaatgaatctcctgattactttataacagcagggttttattgactgccacgatgctaaaaccctgcataacatcaattgttcgtgtgcgaatcataaattaaaattataatgtagacaaaatgtattctgtcggaagaaaagaaaactcactaaagtgcaggaacataacaaaataaaaaaatgggatatcactctgtaattcgccaataccagaatatttgaccagtcagttccggcttatgcgatgaatatcaggtttgccgacaagacagccccgataacctaagatttttgcatgatgagaattaacttattgcctattaattaagcttcacaaacacgatcagctcgcggatttcacgatatacgtcactacaccaaagatatcgagcgtatcgtcgctgccgacaataatcggtgaataggcgctgttcatggggttgagttgaatattgggacgcaactggaggcgcttcacggtaaattcgccctctaccgccgcaatcacgatatcgccatgctcaggcttgcgggaactgtccaccaccagcaaatcaccgttattgatccccccttctatcatcgagtcaccggcggctttgacaaagtaagtggagctgggatgggcgactaataactcgtttaaatcgatacgccgctctacataatccgctgccgggctggggaagccgcactgtactaagtcgctgaaaagtggaatagcaacgatttcacgcaactctgcgggtctgaaaaagatcatgataaacacctccacactatttttatatacagtagttttaactgaggtatcgatcaagccatgtcagcataagcggctggctacgccttaaccgcttcgcttataaccccctatagcaatgaagattatttgttttgtaaatttttacgcatgggcaagcttaacgcgtcataaaacatcactatcaaatcacttaccaatgacttcaaaatacacaaaagacaacttagcatcactgcgtaatcactatccgttgactttctatttagactggcgcatattttacagcacaaattaacaagacaatttttggaggacgttttctatgcctgcccgtgattatcccgataagcgtgttgctcgcggtgtcgcaaaggaggccgaactcaggatgttaagcgcgcgcatcgatcctgcgctgatggagtacatccgcattactgcgcatgaaacacggaaaagtaagcaagaaatcgtggcggaagcattagcgcttcaccgccaaaaaagtcagattggatcataaacagcaaaagcccgaaaaatcctccgggcttttgctgccatcgggattaccccaccagcgaatttaacgtctccagcgcctcaggcggcaaaaccagatcggctgccgccaggttttcacgcagatgcgccaccgatgaggttcccgggatcaagaggatatttggcgagcgttgcagcagccatgccagcgccacctgcatcggcgtcgcgcccagcgaatccgccaccgcctgtagtccggaagattgcagtggcgtgaaaccacccagcgggaagaacggcacccaggcaatcccctgctgcgccagtgaatcgaccagcgcatcgtcaccgcgattcacaacgttgtacatgttctgtacgcacaccacggaaaccatcttctgcgcttcagcaacctgcgaagcggtgacgttgctcagcccaatatggcgaaccagcccctgctgttgcagctccgcaaggatgctcagcggcgcggcaatcgagccttccgccggtccatgggcgctaaacatgatccgcaggttaaccacgtccagcacatcccgcttcaggttacgcagattgtcatgcaccgcctgcgtcagctcctgcgcggaaaacgccggcagccaggaggcatcctcgccgcgtcgggcgccgatcttggtcacaatcgtaaggtcgtcccggtacggatgaagcgcctcgcagataagctggttggtcacatgaggtccgtaaaaatcgctggtatcaatgtgattcacacccgacgccaccgcttcacgcagcaccgccagcgccgcatttttgtcttttggcggaccaaaaacgccaggcccggcaagctgcatcgcgccatagccaaatcgtttaaccgtacgcgttccgagcgtgaacgttccgcttttatctatgctgctcatgctgaccttcctcataaaaaatgatccggatttacaacaggttccgcaacgaaaccattagttaagcaatagtaaaattaaagtttaaattcgctacgacgatagtattgatgtaaccctgcctcttctcttacggatgaccgccatgctgaaaaatctgcacgtgattaccggtattatctttgccctcaccatattctgtctgctgcaagttgtcacgggagggttgttctactctgccgttaacaacgatcgtcacaactttcagaactccgggttactcaatgcccaacaggagagcctgagcgacagcgttaacacgctggtgaaaacacgcgttaccgtcacccgcgtggcgatccgctacctgaaaaaccagcgcgatccggcctctctcgcagcaatcaacacgctgttgggcaccgcgaacggttcgctgaccaaggccgaagactattacaaaaactggcaggcgatttcgcaggtgaagggccagaatgccgcgctcaccgaagagatgcagaaagcctggaagcaaatgcacgaggtgatgcgcttgtccattgagtatctgcgcgccgataactatcaggcctatggcgacctggacgcccagcaggcgcaggatgagatggaggcggtctatacccgctggcgcgctgaaaacaacgtgctgctgaaagccgccgccgaagagaatcagagcagctttacccagatgcagtggacgctggcggcgatcttcctgactgtgatcgccgtgctggtggtgatctggcagggtttacagcacctgctcctgaaaccgctcaacgccatcatgaaccatattcgcaccatcgcgagcggcgatctgacgcaaaatgtcgcgattaccgggcgcaacgagatgggccagctggctgctggtctgcacgagatgcagcagtcgctggtgagcaccgtcagcgccgtgcgcggcagcaccgattctatctacacgggcgcaggagaaattgccgccgggagtaacgacctttccgcgcgaaccgagcagcaggcagcctcgctggaagagaccgccgccagcatggaagagctgactgccacggtgaaacagaactcggataacgcccgtcaggcgacgctgctggcgaagaatgcgtctgaaaccgccgcacgcggcggtcaggtggtggataacgtggtgcgtaccatgaatgacattgccgacagttctcagcaaattgcgcatatcaccggcgttatcgatagcattgccttccagaccaacattctggcgctcaacgcggcggttgaagccgcccgtgccggggaacaaggtcgcggctttgcggtcgtggcaggtgaagtacggacgctggccagccgcagcgcgcaggcggcaaaagagatcaaagggcttatcgagaactctgtcagccgggtgaataccggctcggaacaggtgagcgaggnnnnnnnnnnnnnnnnnnnnnnnnnnnnnnnnnnnnnnnnnnnnnnnnnnnnnnnnnnnnnnnnnnnnnnnnnnnnnnnnnnnnnnnnnnnnnnnnnnnnnnnnnnnnnnnnnnnnnnnnnnnnnnnnnnnnnnnnnnnnnnnnnnnnnnnnnnnnnnnnnnnnnnnnnnnnnnnnnnnnnnnnnnnnnnnnnnnnnnnnnnnnnnnnnnnnnnnnnnnnnnnnnnnnnnnnnnnnnnnnnnnnnnnnnnnnnnnnnnnnnnnnnnnnnnnnnnnnnnnnnnnnnnnnnnnnnnnnnnnnnnnnnnnnnnnnnnnnnnnnnnnnnnnnnnnnnnnnnnnnnnnnnnnnngagcgaggcgggtgcgaccatgaaagagatcgtcgcggccgtgacgcgcgtaaccgatattatggctgagatttcctcggcgtctgacgagcagagccgcggtatagagcaggtcagcctggcggtctcgcagatggacagcgtcacgcagcaaaacgccgcactggtacaggagtcggcaacggcggcggcagcgctggaagatcagtctgaacagctgcgtcaggccgtggcggcattccggctgaacgctcaggcatcgctggcggctcgccctaaaaacgtgaaaacgcccgtactgctgcgcccgtcagcggcaggcgcgaatacagctgacgcgaactgggaaaccttctgagtgacaggcgggcatctcgcccgccttcctgattagcggctgcgcttggcgtggcgctcccagttatctcgcttcgcatcctctgacttacgcaacgagacatagcatgctccgctgccgccgtgatgcggctgcgcttcgcaaaaggcctgtacttcgtcgaactcggtcagccagcgcgcaagatagctgcgcaccacgttaggatgcgactgctgttcacgccctttaccatgcacgatgatcaggttgcgtagcccgtcacgtccggcctggcgaataaaggaatagaccagctggcggcattgctccgcaggctggcgtaacagcgttaagctggcctgacgggaatatttgccggaacgcagcttatcaaataccccctgctgtaccccttcgcgctggtacatgagcggctcggcaaggggcaacagttccagaaaccccagcgtcagaaagttatcgagctgctcagtatctatttcctgacgcgcccgcgtgttgcggctctgctgccagtgaatatccgcgcagcgtttgagcggctggacatcctccatggcgtcaagaaaaagtgatttgtcgtcagggttcatggaaatcctccggctacatctgagtgatgtactatacctgcgcccgttgcgggtctcaatcatccaggcacgggttcaaataatggcttaaggaacagataatcgcagacgcaataaatttaatctaaccttaacttaaatttcagccgtaattaattaaataatttacgttaaaaaatcgtgaaatcaatcactcaacgtccttctcttttaagaaaaagctgttataacttaataaacctgcccaatggataatgcatgtaggatccgcgaaaggacgcacgactgtgtgtactgtggagtctgtctgatgtcgggcagactctatttttttattgttgttattttgattaaattaatttcctggcttcccttcgaaactgcgtgattaatgattcggcaagcggtgtctggcgagaatcacgacgctgaattaaataatatgctgctttaggcagggtttcgacaaccggcagcattatcagacggtgcgccagaagcggatcgcagcccagctcctgcggtaaaatgctgatgaaatcgctttgtgcgacgaggctaatacaggaggaaaaggtctcacagacaacgccaattcgcggtatttgagagcgatggttaaaagtatcctgcaactgcttataataacttccccggggcgtaggcatcgtccagttatattgcagaagctcattaattgaggtcgcccctgtcgccggatgccctgcccgacaaaatacggcaaaaggcttttcgaacagcttttcaaacgtaaattcgtgatcgtacggcccctgataataggtattgatggtaaagtccagctcaccctgacgtaattcattaatcatcgacaccagctggccttccataatccggacgttgacctgaggatgctgcgcatgaaaacgcgtaataacggctggcatcaggctgcgtgaaatactggcccccatcccaatattgatctgcccggcaagttcgccctgccgctggcggatgtcatcctgcgctgcacgcagctcttccagaatcaaattagcgcggtgataaaacccttccccgcactcggtcagcgcgacgcctttactccggcgcacaaatagctgggccgccataccctcctccagctctttaatggatttggtcagcgcgggctgcgaaagattaagcgtccggctggcgccgcgaatgctgccctgacgcgccacttcgacaaacgccctgatttgatgaaatttaatctgaaatgacataacgcgaccgataaccgttgtttatcagagtaaagaaactgtcatctactttaatggaaacggatgtgcgagggtaattcctgaacggttaaaactgtgaaaaaacgattagtgataagtaaaaactatcacagcgtgaagcagttcacatattttaatgatgacaggaaaagatatgaacgcactggcgcagtacattcagacattagctccacaactgagcgcatggcgtcgcgatttccaccattttgcggaatccggctgggtagagtttcgaacagctgcgaaagtcgcggaaatcctcgactcgctgggctacgaactggcgatgggtcgcgacgtggtcgatgccgaaagccgtatgggactgcccgatgatgccaccctttcgcgagagtttgcccgcgcccgggcgcagggtgcgccggagaaatggctggcgccgtttgagggcggatttaccggcattgtggcgaccctgaataccggacgtccgggcccgacgctggcgtttcgggtagacatggatgcacttgatttaagcgaagcgcttgacgaaagtcatcgccccttccgcgacgggtttgcctcctgcaacccgggcatgatgcacgcctgtggccacgacgggcataccaccattggtctggggcttgcgcaggtgcttaagcagcatgaagcgcagctcaacggcaccatcaaactgatcttccagcctgccgaagagggtacgcgcggcgcgcgggctatggtcgccgcaggcgcgctggacggcgtggactactttaccgccattcatatcgggaccggcgtgccgaaagggacggtgatctgcggcagcgataacttcatggcgaccaccaaatttgacgtgcgctttaccggggtcgccgcacacgctggcggtaaaccagaagagggccgtaacgccctgctcgcggctgcccaggccgccatcgcgctgcatggcatcgcaccacacagcgaaggcgcgtcccgggttaacgtcggggtcatgcaggcgggcagcggacgcaacgtggttccggctgatgcgttgcttaaggttgaaacccgcggcgaaagcgaggctattaatcagtatgtctttgagcgcgcacaggcggtaattaccggcgcggcggcgctctacggcgtaacagccggggtaaacctgatgggggcggcgacctccagcgccccttccccggcctgggtcgattatctgcgcgaacaggcaagccaggtgcccggcgtgactcatgccattgataaggtcaaagcgcctgcgggctccgaagatgccacgctaatgatggcccgcgtacagcagaacggcggcatggcctcgtatatggtcttcggcaccgagctgagcgccggacatcacaacgaaaaattcgattttgatgagcaggtgatgaacgttgccatcgaaacgctggcgcgaactgcgcttaatttcccgtggacgcgaggtgtgtaatgcaggagaactacgcttttatcgccgatgccatcgacacgcgatgtcagacgtttaccgatattgccgacgacatctgggatcatcccgaaacgcgcttcgaagagttctggtccgccgaacggctcgccagcgcgctggaagccgagggctttgccctgacgcgggaagccggaggcattcccaacgcctttattgccagctacggcagcggcaagcccgttatcgcccttctgggcgaatacgatgccctggccgggctaagccagcaggcgcactgcgcgacggcgcaatccgccaccccgggggcgaacggccacggctgcgggcataacctgttaggcactgctgccttcgccggggcggtggcggtgaaaagctggctggaacaacacggcggcagcggaacggtacgattttacggctgccccggcgaggaaggcggctccggtaaaacctttatggtacgtgaaggtctgtttgacgacgtggacgctgccgtgacatggcacccggaggactttgccgggatgtttaacgtcagcacgctggccaatattcaggccgcctggcggtttaaggggatcgccgctcatgccgcaaactccccacatctggggcgcagcgcgctggatgccgtgacgctgatgaccaccggtacaaacttcctcaacgaacacatcattgaaaaagcgcgcgttcattacgccatcaccgataccggcgggatttcgcccaacgtggtacaggcccaggccgaggtgctgtacctgatccgcgccccggagatggccgatgcgcagcagatctacgcgcgcatcgagaaaatcgcccagggtgcggcgatgatgaccgaaaccaccgtcgagtgccgctttgataaagcctgctccagctatctgccgaaccgtacgctcgaagcggcgatgtaccgcgcattgcagcattatggcacgccggcctggactgaagaggaacgcgaatttgcccgtgaaatccgcgccacgctcacggcaaacgacctgcaaaacagcctgaaaaacattgccgcaacgggggccgaagagggaaaagcgtttgcccgacgccatcaggagacgctgctggtggatgaagttgccccttacgccatcaccgataacgtgctggcaggctccaccgatgtgggggatgtcagctggaagatgcctgttgcacagtgctttagcccctgttttaccgtcggcaccccactgcatacctggcaattagtggcgcaggggcgtacctcaattgcccataaaggcatgttgctggccggaaaagtgatgggcgcgaccgcgctgcatctgcttcaggatgccgacctgttgcgaaaatgccgggaagagttcgaacaacacataacagaaaaaccgtacgagtgtccgatcccgcagggcgtgacaccgtcacctttaaaataaaaaaacacaacacaacaacacaacaacagtcccgaggaacgcccatgagtatgtcttccataccttcgcattccccatccggtaagctctatggctgggttgaaaggatcggcaataaagtgnnnnnnnnnnnnnnnnnnnnnnnnnnnnnnnnnnnnnnnnnnnnnnnnnnnnnnnnnnnnnnnnnnnnnnnnnnnnnnnnnnnnnnnnnnnnnnnnnnnnnnnnnnnnnnnnnnnnnnnnnnnnnnnnnnnnnnnnnnnnnnnnnnnnnnnnnnnnnnnnnnnnnnnnnnnnnnnnnnnnnnnnnnnnnnnnnnnnnnnnnnnnnnnnnnnnnnnnnnnnnnnnnnnnnnnnnnnnnnnnnnnnnnnnnnnnnnnnnnnnnnnnnnnnnnnnnnnnnnnnnnnnnnnnnnnnnnnnnnnnnnnnnnnnnnnnnnnnnnnnnnnnnnnnnnnnnnnnnnnnnnnnnnnnnnnnnnnnnnnnnnnnnnnnnnnnnnnnnnnnnnnnnnnnnnnnnnnnnnnnnnnnnnnnnnnnnnnnnnnnnnnnnnnnnnnnnnnnnnnnnnnnnnnnnnnnnnngttatgccagctatatggtgctgtttattgccttcttcagccatatctcgtccgacgcggcgctggtgatcatgccgccgatgggggcgctgattttcctcgccgttggccgtcatcctgttgcgggcctgctgtcggcgattgcgggcgtcggctgtgggtttaccgctaacctgcttatcgtgaccaccgatgtgctgctctccggcatcagtacggaggcagccagcaccatcgatgcgactatgcacgtcagcgtgatcgacaactggtactttatggccagttcggtgattgtcctgacgattgtcgggggtctgattaccgataagatcattgagccgcgcctgggtaaatgggaaggccggagcgatgaaaagctggaggcgctgagcaaagagcagcagttcggcctgcgcgtagccgggatcgtctcgctggcgttcattgcggtggtggcgctgatggtggtgccggaaaatggcgtgctgcgcgatccgatcaaacacaccgtactgccctcgccgtttattcagggcattgtgccgctgataattctcttcttcttcgtcgtttcgctcgcgttcggcatcgccaccggcaaaatccgccgtcagggagatctgccgcacctgatgatcgagccgatgaaggagatggcgggttttatcgtgatggtgttcccgctggcgcagtttgtcgccatgtttaactggagcaacatgggcaagtttatggccgtgagcctgacggacgcgctggaggcggcggggttgagcggtgttccggcgtttgtcggcctggcgctgctgtcgtccctgctgtgcatgtttattgccagcgggtcggccatctggtcgattctggcgcccatctttgtccccatgtttatgatgctcggcttccatcctgcgttcgcccagatcctgttccgtgtcgccgattcctcggtgatcccgctggcgcccgtgtcacccttcgttccgctgtttttaggcttcctgcaacgctacagaccggaggctaagctgggtacctattattcgctggttctgccctatccgcttatcttcttaggggtatggctggtgatgctggtggcgtggtatcttgtcggcctgccgattggaccgggtgtttacccgaggctgaactaaggagtactgatgctgagattactcgaagataagattgcgacgccgctggggccgctgtgggttatcgcggatgaagcgttcaatctgcgcgcggttgaatgggaagagcacagcgaccggatggttgagctgctcaacatccattatcgcgccgagggttacgagcgtattactgcccgtaatcctggcgggctgagcgataaactgacggcctacttcgagggcgatctcagcattattaataccctgccaaccgccacggcgggcacccctttccagcgcgaggtgtggcaggcgctgcgtaatattccctgcgggcaggtgatgcactacggtcagctggcagaacagcttggccgtgccggcgcggcgcgcgcggtcggtgcggcaaatggctctaaccccgtcagcattgtggtgccttgccatcgcgtgatcgggcgcaacggcaccctcaccggctatgccgggggcgtacagcgcaaagagtggctgctgcgtcacgaagggtattttctgctgtaattcccaggctttttgtgcttaattttcttcctgttaggttcataatccttaatcattctgtggaatttcaaggagatggcaacacgctgccgtctcttgtctttattgggggtttgccagacttacgtccttaccaaaaagatgttaaaattgaccaatatcaattaaggcttgagcaaacctatgatcccggaaaagcgaattatacgacgcattcagtctggcggttgtgctatccattgccaggattgcagcatcagccagctctgtatcccgtttactctgaatgagcacgaactcgatcagcttgacaatatcatcgagcgcaaaaagcctattcagaaagggcagacgctgtttaaggcgggagacgaactgaaatcgctctatgctatccgttctggcaccatcaaaagctacaccattaccgaacagggcgacgagcagatcaccggcttccatctggcaggcgatttagtcggctttgacgccatcggcagtggccatcacccgagctttgctcaggcgctggaaacctctatggtctgcgaaattccgtttgagacgctggacgatctgtccggtaagatgccgaacctgcgtcagcagatgatgcgtctgatgagcggtgagattaaaggcgatcaggatatgatcctgctgctttccaaaaagaatgccgaagagcgtctggccgcctttatctataacctctcccgccgtttcgcggagcgtggcttctccccgcgtgaattccgtctgaccatgacgcgcggtgatattggtaactatctgggcctgaccgtggaaaccatcagccgtctgctgggtcgcttccagaagagcggaatgctggcggttaaaggtaagtacatcaccatcgaaaacggtgaagcgctggccattctggcgggtcactcacgtaacgtggcataactctcccggatatcttatgccaggtcgataaattttcatgattattgatctggcaaaaacttcccccctgtttcattcaagatatataggttactcttttacttacagactgtggtgacagtagtaaggagacctgtatggcaaagtatcaaaacatgctggtggctatcgatcctaatcaggacgatcagccggcattacgacgtgctgtgtatttacatcaacggattggtggcaaaattaaagcctttttgccgatttatgacttctcatacgagatgaccacccttctgtcgcctgacgagcgcaccgctatgcgtcagggagtgatcagccagcgtaccgcgtggatccgcgagcaggcgaaatattacctggaagcgggcgtaccgattgatatcaaagtggtctggcacaaccgacctttcgaagccattattcaggaagtggtggccggtgggcatgacctgctgctgaaaatggcgcaccagcatgacaaactggaatccgtgattttcactccaaccgactggcacctgctgcgcaaatgcccttgcccggtatggatggtgaaagatcagccatggcctgagggcgggaaagccgtcgtggcggtgaatctggccagcgaagaggattatcacaattcgctgaacgagaagctggtgaaggaaaccatccagcttgccgaccaggttaaccacaccgaagtccatctggtgggtgcctatccggttacgccaatcaatatcgccatcgagttgcctgaatttgacccgagcgtgtataacgacgcgattcgcggtcagcatctgctggccatgaaagcgctgcgccagaaattcagtatcgatgagaatatgacgcacgtagaaaaagggttaccggaagaggttattccggatctggcggagcatttgcaggccgggattgtggtgttgggcaccattggccggaccggtatctctgccgcgttcctgggaaataccgccgagcaggtgattgaccacctgcgctgcgaccttctggtcatcaaaccggatcagtatcaaacgccggttgaactggacgatgaggaagacgattgaccccaaaatgaaagcccgccggtaacggcgggcctttttattacgcttcgctcaaccgctgcgtcggtgcctcgtcgccggcattcatccagggcgcgtgcagaaccatgctcggcagcgccagcttgatctcctgctggttcagcccctccagaatacggatattgatctcctgctgaatatccatgtacttgttgtagtccgccgtattaacgatatggaccacctcgaaggtcaggcgatcgcgatcgaagcccaggaaatgggcgcggtcaaacttcgtttccccgacgtcggtaatgatctgtttgaccatatcacccactgaacgcagtttgtccggcgccgtgtcgctggcaaccccgaaggtaaagacgatccggcgcgtttgcatccgtttgtagttatgcagcgtctgttgcagcagaatggcgttcccgcaaacaatctgctccccgctcaggctgcggatacgggtggttttcaggccaatgtgctctaccgtcccggcgacatcgttaaacaccacaaaatcgccaatttcgaacggcttatcaaaaccgatggaaagcgatgcaaacacgtcgctcaggatcgtttgcaccgcgagggcgattgcaataccccctaccccaaggctggcaaccagagcagtgatgttgacgcccgcgttagcaagaatagacagcagcatcactgaccagactatggcacggaggataagccccgtgatcaccagcgtcaccgggtttttatggcttcccggcgccagcatgacgtgacgaagccacgacaccaccccctgatccatccacagcgccacctggatagcgaagaccaggaaccaggcgtggctcacggtaccaaagagatgatccggtaagtcgacgaaacgcaggctgaataacagcgccacgacaaaaagcaggaagcggctggtgcggttaagcatatccgtcaggataaaacgcatccggttggtggtggggtgcttgtcgccccaggtagtgatccctttcttaacgaaggcgatcagacgcgtcagcagccagtacaccagcagagtcataaaaaccaccgtggcgacgccgatccagaaagacggcgtcatcatcagctcgatgatgtcgaagcgggacaaaaatcgcattacacctcctcgtattacacaaagggtaaagtatagacagaggagaaaagctggccgcagaaataagaaaaccgccccagggggcggtttgtcaggatgaagcgcaattacagcgctttcaggatcgcatccacgctggccttggcgtcgccaaacagcatgtgggtgttatctttaaagaacagcgggttctgcacgccagcatagccggtgttcatagagcgtttgaagacaatgacgttctgcgccttccacacttcgagaacaggcatacccgcaatcggactacgcgggtcgtcctgcgccgccgggttaacggtgtcgttggcgccaatcaccaacacggtgtcggtgtcggcgaaatcatcgttgatctcgtccatttccagcacaatgtcgtaaggcaccttcgcttccgccagcagcacgttcatgtggcctggcagacgccccgccaccgggtgaataccaaagcgaaccttgatgccgcgcgcgcggagtttctcggtgatttccgccaccggatactgcgcctgcgccaccgccatgccatagcctggggtgatgatgacggaatgcgagtttttcagcatctctgcggtctcttccgcgctgatttcacggtgttcacccacttcctcatcagaaccggttgatgagccgtcagaaccgaagccacccgcgatgacgctgataaacgaacggttcatcgccttacacatgatgtaagacaggatcgcaccggaagaaccgaccagcgcaccggtgacaatcagcaggtcgttgctcagcataaagcctgccgccgccgccgcccaaccggagtaggagttcagcatggaaaccaccaccggcatatctgctccgccgatagacgccaccagatgccagccgaaggccagcgcgatgatggtcatcaccagtaacgccagcacctgcaagcctacgctttcggtacgcacgaagaccaccagcagcacaaaggaaacgaccagcgccgccaggttcagcttgtggcggttaggcagcatcagcggtttggaagagatcttcccgcgcagcttgccgaacgccacaatcgacccggtgaaggtcaccgcaccgatgaagatgccgaggaacacttcggtcaggtggatgttcaccagaatcggctccaggcccggttcgtggtacaggtagctgttgaagcccaccagcaccgccgccagacccacgaagctgtgcagaatggcaaccagctccggcatctcggtcatttcaacgcgtttcgccagacgaataccaatcgcgccgccgatgatcatcgccaccaggatccacgccacgttgccggtgtccggcccaaagatggtggcaatcagcgcaatcgccatcccggcgataccaaagttatttccctgctgagacgtttcgtgtttggaaagccccgccagactgaaaataaacaggattgcagcaacaatgtatgcggctgtaactaatcctccagacatatgctaccccttagcctttacgaaacattttcagcatgcgctgagtcacggtgaaaccaccgaaaatattgatactggcgatcagcaccgcaatgaagctcaggaagctgatccagccgccatgaccaatttgcagcaatgccccgaccacgataatcccggagatggcattggtgaccgacatcagcggggtatgcagcgcatgagaaacgttccacacgacgtagtaacccaccacgcaggagagcgcgaagacggtgaagtggccaaggaactcttttggcgcgacatccgccagccagccaaacaggataataaccagcgccatgatggcgtatttgcgccacggcgacgcaggttttgctggctccgcgggctctggcgccgctttcggcgcagcctgaggttgagcggaaacctgaatcggcggtgcaggccaggtgatttccccttcacgcaccacggtaacgccacgcaccaccacatcatcaaaatcaacggtaatgttgccgtctttctctttgcagagcagcttcagcaggttaacgaggttcgtgccgtacagctgagaggactgggttggcagacgccctggcaggtcggtataaccgatcaccttcacgccgttcgcggtcgtcgtgacctggtttggcacggtatactcacagttaccgccgttttgcgccgccagatcgacaataacgctgcccggctgcatggaatccaccatctcacgggtgatcagcttcggcgccggtttacccggaataagcgcggtggtgacaatgatgtccacctcttttgcctgcgccgcaaagagcgccatttccgccttaataaaggcttcagacatgaccttcgcgtaaccatcaccgctgcccgcttcttccttgaagtccagctcaaggaattcggcgcccatactctgcacctgctccttcacttccggccgggtatcaaacgcgcgaacaatagcgcccaggctgtttgcggccccgatagcggcaagaccagccacaccggcaccaatcaccatcaccttcgcgggtggtactttacctgccgccgtaatctgaccggtaaagaagcgaccaaactcatgcgcagcttcgacaatggcgcgatagccggcaatgttcgccatggagctcagcgcatccagagactgcgcgcgcgaaatacgcggcacggagtccatcgccatcacggtgacaccgcgtgctgccagcttctccatcagctccgggttttgggctggccagacaaagctcacaagcgtcgtgcccgcgttcagcagttcaatttcactctcttccggtgcgttgaccttcagaatgatgggtgattgccagacctcagcaccgtccactacgtccgcgccagcctgagtaaaggcctcgtcatcgaaactcgccagtttgcccgcgccgctttcaatcgcgacggtaaaacccagtttaagcagttgctccaccgtttttggtgttgccgctacgcgggtttcattggctaaccgttcttttggtaccccaatacgcatagttttcccttccatcggtttttgatgatggtttgtcgataattgcccacggtttgtatcaattttcaccatcgagatatcgacggagaatgattaaccccggaaaataaaacagtaacaaactttctataacctactgaaaatagcgcccgtgatctaccgccagaaaacactatttcttactttatctgtgaaaaataagcgatcggggtcactgacagagatatttaccttaaattcgccttcaggaccgataaatcgcgcaagcgaagcggtaaaaacatgatatagcgccataaaagaacaactcattaacattaaattaacttgtaaaagtcatatgcttaatcagattttcttgtgaaacgcctgttttttccacatatcacaaaatgttatcgaatcaggtcctttggtgagcacaggctgtgaaaaatgccgcagacagcgacgggtgttaaatgccataatcgggaccgtctcaaattaacaacaacaccagtacatggtttgcgcaaggcgaaggattatttttatgaagcttaagaacacactcctggcgtccgcacttctttccgcgaccgccctgtctgcgaatgccgcgacagagttgacgccggagcaagcggcagcgttaaaaccttttgaccatacggtcattgtgggtcgctataactctattggcgatgccgtcgccgccgcatcaaaagccgccgataaaaacggcgctgcctcgttttacgttgttgaccagtccgatcagggcaacagcggcaaccagcgcgtgacgattgcgctgtacaaagagaatgccccaaaagcagatgaacagaaaaaccgcgtgattaacggcattgttgaactgccgaaagatcaggctgttcagctggaaccgtatgacaccgtgaccgttcagggcttctaccgcagccagcctgaagttaacgatgccatcaccaaagccgcgagagaaaaaggcgcttacgcgttctatatcgtgcgtcaggttgatgccaaccagggcggaaaccagcgcatcaccgccttcatctataagcaagatgcgaaaaaacgcgtagtacaaagcccggatgccattccagcggattcagatgcgggacgtgccgcgttagcgaaaggcggtgaagaagcgaagaaagtggaaattccgggcgttgcaacctcggcggcaccaagcgctgaagtgggtcgtttctttgaaacccaatccaccaaaggcggtcgttataccgttacgttaccagacggcacgaaaattgaagagctgaacaaagccactgccgcgcagatggttccgttcgacagcatcaagtttacgggcaactatggcaacatgacggaaatctcctatcaggtggcgaagcgtgctgcgaagaaaggcgcgaagtattaccacatcacccgccagtggcaggaacgtggtaacaacctgaccatcagcgccgatctgtacaagtaacaaaacggtttcataaaggcggcgcagtgccgccttttttgttactttttttctgatttctgccacacgtcattgcatgcacccttcactctccgtaaaatcccgcgccttagcgtgatccaccatttttatgcgccttagcgaaataattattctggatttggacttttcataacaggaagccaatggaaaagaaacttggcctgagtgctttaactgcacttgtattgagctcaatgctgggcgcgggcgtattcagtttgccgcagaacatggcggccgtcgctagcccggccgcattactgattggctggggcattaccggtgtcgggattttgctgctggcgttcgccatgctgctgctgacccgtatccgaccggatctggacggcggaatattcacttacgcccgggaaggtttcggcgagctgatcggcttctgctccgcctggggttactggctgtgcgcggtgatcgccaacgtctcctatctggttatcgtcttctcggcgctcagcttctttaccgatacgcccgaactgcgcctgtttggcgacggcaatacctggcagtccatcgtcggcgcctcggtcctgctgtggatagttcactggctgattttgcgtggcgtccagaccgcagccagcattaacctggtggcgacgctggccaagctggtgccgcttggcctgttcgtcgtgctggccttcctcgccttccgtctcgatgtctttacgctcgatttcagcggcattgcgctgggcgtccccgtttgggaacaggtgaaaaatactatgctgatcaccctgtgggtgttcatcggcgttgaaggtgccgtcgtggtctctgcccgcgcgcgtaacaagcgcgatgtgggacgcgccacgctgctggccgtactggcggcgctgggcgtttatctgctggtgacgctgctgtcgctcggcgtggtagctcgccctgaacttgcggaaatgcgtaacccgtccatggccgggctgatggtgaaaatgttgggtccctggggggacgtgattatcgcggcgggtctgattgtttccgtttgcggcgcctatctgagctggaccattatggcagcggaagtcccgttcctggccgccacgcacaaagcgttcccgcgcctgtttgcccgtcagaacaaaaacagtgcgccatcggcctctctgtggctcaccaacatcagcgtgcaggtctgtctggtgctgatctggctcacaggatcggactataacacgctgctgaccatcgcctccgagatgattctggtaccctatttcttagtgggcgcatatctgttaaaaattgcgacccgcccggcacactatgcggtaggcgtcggcgcctgtatttacggtctatggttgttgtatgcttccggaccgatgcatctgctgctgtccgtggtgctctacgcgccgggcctgctggtgtttatctacgctcgccgtacacatcagcttgataatgcccttaagcgccgcgaaatggcattgataggtttgctgttagtcgctgccgtaccggcaacgtggatgttaatgggatagcgccgcctgtcccattgttgaactgaaaaggagattacgatgggacacacgcagcaacgcccaatattgatcactggcgcaggccgtcgcattggcctcgccctcgcccatcactttctcaatcttcgccatccggttatcgtcagttaccgcacggaatatccctccattaaagggctacgaaatgccggagcagtctgcattcaggcggatttctccacagatgaaggtattctcgccttcgcggacaaagtgaagtcgaccacccacggactgcgggcggttattcacaacgccagtacctggcttcccgaaaaagcaggacattcactcagcgaaacgctcgcctgcatgatgcagatccacgttaatgcgccttatctgctcaaccatgccctacaggatttgctgcgcggacacggccatgccgcaggcgacattatccatttcaccgattacgtggtggagcgaggaagcgacaaacacatcgcctatgcggccagcaaagccgcgctggataatatgacccgctctttcgcacgcaagctggcgcccgaggtaaaggtcaacgcgattgctccggcgatgattttatttaacgaaggcgatgatgccgagtatcgtcagcaggcgctcaacaagtcgttaatgaaaattgcgcccggcgagaaagaggtgatcgacctgatcgattatctgttgaccagctgttacgtcacgggccgaacgtttgccgtggacggtggccgccccctgcgctagtgaaagcggctccagaagaagatgagcacccaggcgctgaggctccagcagaccaccgccccgcccagcgccatgggcagacgcagaaaaccggtgaagtaccacagcgacagcaggtaaataaaatacgggatgatcgaccacatcccgaacacaatggtggcgcgcagcgcctcaataccccgctcagaggccacaatatagtgcgcgattaacgcaaaggtgggaaacagcgggatcagcccggcaatgtagtagttcttcgttttagccagcaccccaatcagcagcacgaccagcgcacccagcgcggcttttatcaccagccccattcttttcccttaacaatcaaataacattcccgtgcaggataacggaactccggctaattttgaaagattaatggaaggttaaggttgcgcggtgtatgttgacgtttttcgcgatgacagacgttgtatgaataagattgtttatgttgaagatgaacccgaggtggggcaattaatcgccgcttatctgggtaaacatgatatggaagtggttgtcgagcctcgtggcgatcgcgctgaagacgtcgtcaaccgcgaaaatccggatctggtgttgctggacatcatgctgcccgggaaagatggtatgacgctatgccgggatctgcgcgcgaaatgggacggcccgatcgtgctgctgacctctctcgacagcgatatgaatcatattctgtcgctggagatgggcgcaaacgactacatcctgaaaaccacgccgccggcggttctgctagcccgtttacgcctccatctgcgtcagcgtgccagcgctgagcgtgaagcgcctgcgccctccttaacgccgcataaagcgatgcgtttcggcacactttctatcgacccggtcaaccgacaggttatgctttccggggagctgattgcgctctcaaccgcagattttgacctgctgtgggagctggcaacccatgccggacaaattatggaccgggatgcattactgaaaaatctgcgcggcgtaagttacgacggaatggatcgtagcgttgatgtggcgatttcacgactgcgtaaaaaactgttggataacgccacggaaccttaccgcatcaaaaccgtacgcaacaagggctacctgtttgcaccgcacgcctgggaaacctgaaaaaggagccaactggaatattcaaaaaataactgacgatgcatcggaattgttatcggtattcgtcgaaagttatcgattatatgcatcgtcagttatgacatatcctctggtctgattcctctctccagttctattcgatgtgcatttttcgcgtaaacaaaagtagcgctaatgtatttgattgctatagtacaatatatattcagcagagcaggcaccatcatcgatcaaaaatccgtcacttaaatgcacattaggctaaaaatgatctttacaattgacttaatcattatcttatccttatgaaaacaaaggggataatggcgaacatataaataatatcgatctttttcaatagcttacgtgtttgcagaaatctaattctcatgctaaaccttatactctctcaattatttaatgaaagaggtatagcaatgtcatggagagtcattagctcggtaatttgtcctaacacgggaatcgtttattcaagcatcttgggactcaagttcttgaaactcatcatttggtatgaaagcgatgtctatttgtaccccggtgacaggatatatccgacaaaaaatggcgtcttcataaatggtgttttcaagcctatatcgatatacaacatatcaccttacaacgaaatgttgtggagtgaaattaaaaacaagatggcctgcccatacaatcgaaaccagcacgaggagatatgcacttacgcggtgcattgcaacgcgaggaaatgcccgcatggatttgccaccaacccactgattgtcagcacaggtaaatccagacattagcgaaaatcggaaatatttagatcaagataattaatatttctgctgcaccgcctttgtccggataaatctccgtgactacagcccaaatgctcctgtggggacatttgggctgtagtcacgcctggcaactctggcttcttgtaccaaattaatttttattgtgcaattttaagcaagccatccggaaggctaaaataaaaattgctaattaaccctgcccgtgcattaatggtctcgttagtccgatccaataatagttggacaagttgcatgacaatcctcataaccaggcgctatcgctgatatcccctccttttgagtccacaccttagcattatatgtttattagcttttatatcacttcggaaatgttcaaatggagtctttatgtcatcaaaaattttaggtctggttaagtggtttaaggaagataaaggctttggttttatctcccctgtagatggcagcaaagatgttttcgtgcatttctctgcccttcagggagagaacttcaaaactactttttgaaggtcagaaagtcgaatttatcatcgtaagcnnnnnnnnnnnnnnnnnnnnnnnnnnnnnnnnnnnnnnnnnnnnnnnnnnnnnnnnnnnnnnnnnnnnnnnnnnnnnnnnnnnnnnnnnnnnnnnnnnnnnnnnnnnnnnnnnnnnnnnnnnnnnnnnnnnnnnnnnnnnnnnnnnnnnnnnnnnnnnnnnnnnnnnnnnnnnnnnnnnnnnnnnnnnnnnnnnnnnnnnnnnnnnnnnnnnnnnnnnnnnnnnnnnnnnnnnnnnnnnnnnnaaaggccctgctgctgcgaatgtaacgctttgcgataaataatatcagcacacagccgcgttgacgatgatgttgcttctggctcgtggactgcacaagcagtctacaatccgatgctaactgcttgtaaatcagtaaagtgttattgaggtcaggcggccgcgaaaaacatcgtctcttccacttcttgtatgagtatttcttcagagacgctgagaggatttaaacaaagcgctacagtagggacagacaagttgggcccccttttgtatgcgagtgaaactgtgctctgactctttagcgcagtttggacatgaacatttgactaaataattgcgacgaagttgcgagtttttacgtcccgacataggctgctcctgaatgaaaaggattgccaccatacacgttaaggcaggatattgcttgcttttatttcccaaagagagcaaaaaaggaaaggagccacgcttctggaacattcttaccttgcacaatcacaaagagatatagagtgatatatgaaaaaggtgatcattttttttaatgccaaccccagcaaagtcattatcgtgcttaagggcataacgtctgtacgccagacatatccggatggtgaagaaataaatcttcagatcatgactgcaagctttctgtcgttgacgggagatcataattctatctatgttgcttcagacagggaacttacctctcaggaaatatctgatgctgccaaacaatatttataatattttctgtcactagtccggttaacaacacagcatttatttcactcagaatgagaaaaattacaatccatcattattaatgcctgcaaaatgcaggcttttttacgacattgccctttaaatttaactattccgcataatcgtgctgctcactttgctccctctgtttccgaagaaagtgtatcatcaaccttcttcgttcctgtggtgatatggatgtccacgcagggctgacgaagtaaagccgggttcttaattgattgatttagcggtgctatccaatgaaaaagctgtttgtgcagttttatctcctgctgtttgtctgctttctggtgatgaccatgctggtcgggctggtctacaaattcaccgcagagcgcgcgggcaggcaatccctggacgatctgatgaaaagctcgctctatctgatgcgtagcgagctgcgagaaattcctcctcatgactgggcgcgcacgttaaaagagctggatctgaatctgtcgtttgatttgcgtatcgaacccatgaaggattttgacttagcgccgcctgcgatgcagcgtctgcgcgacggagacatcgtcgcactggacgagaaatataccttcattcagcgtattccacgcagccattatgttctggccgtcgggccagtgccctatctctattacctgcaccagatgcgcctgctggatctcgctctgctgggctttattgccatttcgctcgctttacctgtgttcatctggatgcgaccgcactggcaggacatgctgaaactggaatccgccgcacagcgttttggggagggtcatttaactgaacgcatacatttcgacagcggttccagttttgaccgactcggtattgccttcaaccagatggccgataacatcaacgccctgattgccagcaagaagcagctgatcgatggtattgcgcatgaactgcgcactccgctggtacgcctgcgttatcgcctggagatgagcgagaacctcaccggggcggaatcgcaggcgctcaatcgggatattggccagcttgaagcgctgattgaagagctgctgacctatgcccgcctcgatcggcctcagacggagttgcacctcagttcaccggatctccccgtctggctacagacgcatattaacgatgtgcagagcgttaaccctcagcgaaaactgctgacagccattactcccggcgcgtacggcgcactggacatgcgcctgatggaacgcgtgctggataatctgatgaacaacgccatgcgctacagcgaaacgacgctgcgcataggtttagatttgcagggaagccnnnnnnnnnnnnnnnnnnnnnnnnnnnnnnnnnnnnnnnnnnnnnnnnnnnnnnnnnnnnnnnnnnnnnnnnnnnnnnnnnnnnnnnnnnnnnnnnnnnnnnnnnnnnnnnnnnnnnnnnnnnnnnnnnnnnnnnnnnnnnnnnnnnnnnnnnnnnnnnnnnnnnnnnnnnnnnnnnnnnnnnnnnnnnnnnnnnnnnnnnnnnnnnnnnnnnnnnnnnnnnnnnnnnnnnnnnnnnnnnnnnnnnnnnnnnnnnnnnnnnnnnnnnnnnnnnnnnnnnnnnnnnnnnnnnnnnnnnnnnnnnnnnnnnnnnnnnnnnnnnnnnnnnnnnnnnnnnnnnnnnnnnnnnnnnnnnnnnnnnnnnnnnnnnnnnnnnnnnnnnnnnnnnnnnnnnnnnnnnnnnnnnnnnnnnnnnnnnnnnnnnnnnnnnnnnnnnnnnnnnnnnnnnnnnnnnnnnnnnnnnnnnnnnnnnnnnnnnnnnnnnnnnnnnnnnnnnnnnnnnnnnnnnnnnnnggccccggcattgggccggcggagcgtgaaaaagtttttgagccgtttgtgcgcctcgatcccagccgcgaccgggctaccggcggctgtggtctggggctggctattgtccgttctattgcccaggcgatgggcggttcggttcgctgcgaagcgagcgagctgggtggggcccggttcgtctttagctggccgatctatcacaatattccccttcccgtacctgcctgacctaaaccgcacgctggcctgaccctgcgtgttatgctatatcagtagtatgttgtaactaattaagggctgccatggcaacttacgatctcatcgaaaggcttaacaccacatttcgggaaatagagcaggcgttactgaccctcacggggcaacttcatgactgccgcctgctggccgcccgcgtcttttctctgcccgaggtggcgaaaggcgcggagcacgacccgctgaacaccattgaggtgacgcagcatgttggcaaggcggcgctggaaatgacgttgcagcactttcgtcgccttttcatccagcagcagtccgaaaatcgcagcagtaaggccgccgttcgcctgcccggcgtcatctgcctgcaaacggatgccgcaacgcgtgaaggaattgaggcgcagattacgcatatcaatacgctgaaagccgcgtttgagaagattgtaaccgttgagtccgggctggcgccggctgcccgttttgaatgggtgcatcgccagcttccggggctgatcaccctgaatgcttaccgcacgctgacggtactgcgccaccccgccacgctgcgcttcggctgggccaacaagcacatcattaaaaatttcacgcgcgatgagatcctggctcagctggagaaaagcctgaaatcgccgcgaacggtcgccccgtggtcgcgggaacagtggattgaacggctggagcaggagtaccacagcattgcctccctgccagctgatacccgtcttaaaataaagcgtccggtgaaggtacagcctatcgcccgcgtctggtacgccggacaacaaaagcaggtgcaatacgcctgcccgacgccgctgattgcgctctacgatgccgatcagggtgcggtggtgccggatatcggggaactgctgaattacgatgctgaaaacgttcagcatcgctataaaccccaggcgcagccgctacagctgattattccgcggctgcacctgtatgtggcgcagtgattatctgaggctgcccaccatcgcttccgggcggacccaggcatcaaactcggcgtccgtcaggtagcccagcgccagcgcagaggctttcagggtaagcccctctttgtgcgcttttttagcgatttcggccgctttgtcataaccaatatgggtattcagcgccgttaccagcatcagagactcattcagcagctggctgattcgctcgcgattaggctcaatgcccaccgcgcagtgctcgttaaagctctccatgccatcggccagcagacgaatcgattgcagtacgttgtggatcaccatcggacgatagacgttaagctcgaagttacccgacgcgccgcccatgttaaccgccacgtcattacccatcacctgacagcacagcatggtcatggcttcgcactgggtcgggttcactttacccggcataatggagctgcccggctcgttttccggaatgctgatttcgccgatgccgcagcgcgggccggaggccagccagcgcacgtcgttggcaattttcatcagcgaggccgccagccctttcagcgcgccatgggtatgcaccagcgcatcacaggtcgccagcgcttcgaatttattcggagcggtaacaaacggctgcccggtgatcttcgccagctcttcggccacgcgcaccgcgtactcgggatgggtgtttaagccagtgcccaccgccgtcccgccgagcgccagctccgccagatgcggcaggctgttgtcgatatgcttaagattgtgctccagcattgccacccagccggagatctcctggccgagcgtcagcggcgtggcgtcctgaaggtgcgtacgaccaattttaacgatgtcacggaaggcctgcgctttctcgttaagcgtagatttaagcacgttgagctgcgggataagctgctcgcggattgcgatgacggccgccacgtgcatggccgtcgggaacacgtcgttggaactctggcttttgttcacgtcatcgttcgggtggaccttgcgctccatgccgcgcacgccgccaagaagctcgcttgcgcggttcgccagcacctcgttcatgttcatgttgctctgggtgcctgagccggtctgccagatggcaagggggaattcgtcgggatgtttgcccgccagcacttcgtcggcggcattgatgatggcggtggctttatcggcatccagcaggcccagatcctgattgactttggcggcagcgcgtttggtcaacgccagcgcctggattagcgagacgggcattttctctgtcgaaatgcggaaatgctccagcgaacgctgggtttgtgcgccccatagcttgtcggccgggacgtcgatggcgcccatggagtctttctcgcggcgatgcattgtcattacttactccttgataacaaagatgggattgctcacatgcttaagagataagtattgataacttctgagaaacgttatggcgctttgtgcgctctttttgatgtcgggtggcggctgcgccttacccgacctacgagaatgcaggccgggtaagcgtcagcgccacccggcaatttacagaattacttcacacacgccgaacactgggaagactggatctgtttgaagaagtcgttacctttgtcatccacgaggatgaacgccgggaagtcttccacttcaattttccagatcgcttccatacccagttccgggtactccacgcactccaggctcttgatactgccctgcgccagcaccgccgccgggccacctatactgccgaggtaaaagccgccgtgcttatggcacgcgtccgtcacctgctggctgcggttgcctttcgccagcatgatcatgctgccgccgttggcctgcaactggtcgacgtaggagtccatacggcccgccgtggttgggcctaacgagccggaagcatatccatcaggcgtttttgccgggcctgcgtagtagatcgggtgatctttaatgtactgcggcagcccttcgccgttgtccaggcgctctttcagcttcgcatgggcgatgtcgcggcccacgataatcgtcccgttcagggaaaggcgcgttgaaaccggatactgcgaaagctgcgcgaggatctctttcatcggacgattcaggtccacgcgaaccgcttccccctcgcccgctttacgcagttcttcaggaatatatttgcccgggttgttctccagcttctcgatccagatgccgtcgcggttgatcttcgccttgatgttgcgatccgccgagcatgagacgcccatgcccaccggacaggaagcaccgtggcgcggcaggcggatcacgcgaatgtcatgcgcgaagtatttgccgccaaactgcgcgcccaggcccagattctgcgcttcggccagcagttcctgctcaagctgcacgtcccggaacgcctgaccatgttcgttaccttccgttggcaggccatcgtagtatttggttgaggccagcttaacggttttcagggtgctttcggcagacgtaccgccaatcacaaacgcgatatggtacggcgggcaggccgcggtgccgagggtgcgcatcttctcgaccagataattcttcagcttgcccggggtaagcagcgctttggtttcctggtaaagataggttttgttggctgaaccgccgcctttggcgatgcagaggaatttgtactcgtcaccgtcgacgctgtagaggtcaatctgcgcaggcaggttggtgccggtgttcacctctttgtacatatccagcgccgcgttttgcgaatagcgcaggttgtcttcggtgtaggtattgtaaacgccgcgcgccagcgccgcttcgtcaccgccgccggtccagacgcgctggccttttttaccggtgataatcgccgtgccggtgtcctggcaggtcggcagaatgcctttcgccgcgatatcagagttacgcaggaattgcagggcaacgtacttatcgttctcactggcttccgggtcgctcaggatatcagcaacctgctgctgatgcgccggacggagcataaaggaagcatcatggaaggcttgctgcgccagcaacgtcagcgcctgcgggtcaactttgaggatctcctgcccttcaaactcagagacagaaacgtaatcgcgggttaacaggtaatactcggtctgatcctgactgagggggaaaggatcctgataatggaagggtttattcgacattgttctctcacttactgcttcggtctgtttattcagggcagatgttccgctgcccggcttaaaagcgagtcagcttatcctacacaattttttaacaaaaactgagactagtacgactttttacatccgcaggttacttccattcggtttattgctttaatacgcggagttaattccacatatgaatcagggcttgataatgcaaaaactcatcaactcagtgcaaaactacgcctggggaagtaaaactgcgttaacggatctctacggtatcgccaacccggacaacctgccgatggcagagctgtggatgggcgcgcatccgaagagcagctcaaaaattgaagatgccagcggccaggttcgcagcctgcgtgacgtcatcgacgccgacaaagccgcactgctcggcgataaagtggcgaatcgttttggtgagctgccgtttctgttcaaggtattgtgcgccgaccagccgctctccattcaggttcacccgaacaaaaaagcctctgagctgggctttgccaaagaaaatgccgccggtattccgttagacgccgcagagcgtaactacaaagatcctaaccacaagccggaactggttttcgcccttacccctttcctggcgatgaatgccttccgcgagttttccgagatcatctccctgctgcaaccggtcgccggggctcacaacgcgatcgcccatttcctggaaaacccgaacgcagaagccttgtgcgaactgtttgccagcctgctgaatatgcagggcgaggaaaaatcccacgcgctggcggtgctgaaagccgcgctgaacagccagcagggtgagccatgggacaccattcgcgtaatttccacgttttatccggacgacagcggtctcttctctccgctgctgctgaacgtggtgaagctcaacccgggcgaagcgatgttcctgttcgctgaaaccccgcacgcctacctgaacggcgtggcgctggaggtgatggctaactccgataacgtactgcgcgcgggcctgacgccaaaatacatcgacatccctgagctggttgccaacgtgaagttcgtggcgaaacctgctgcggagctgcttacgcagccggtgaaaaacggcgcagagctggacttcccgattccggttgacgattttgccttctcgctgcacgacctcagcgcagacgaaaccgccattgcacaggagagcgcagcgatcctgttctgtgtagaaggcgaagcgacgttgcataaagatagcgagcgtctggtgcttaaaccgggtgaatccgcctttgtcgcggccaacgagtcgcctgtccgggtgagcggcaccggtcgcctggcgcgtgtttttaataagctttagggacttactgaattttttaacaactcttgctaagctagtaacaggcgttgtaacaccaggcggttttaaccgcctggtttcattttagggataatcgcaatgaaaaaatcggtcgtagcggtaggagtgattgttgctttaggcgtgatctggacgggtgcttcctggtataccgggaaacagctggaaagccgtctggcagagatgatgacgcaggcaaacagcgagattaagcgcagcgcgcctgaagcaggtctggagctgagctaccagaactaccagcgtggcgtgtttaccagccatatgcaggtggtggtgaagccggttgcgggtaatcagaacgcctggctgaaaccgggccagagcgtggtgctggatgaagtggtcagccacggtccgttcccgctggcgcagttgaaaaagtttaacctgatcccctccatggcatccgccagaaccgtactggtgaataacgaggtgacgaagccgattttcgatatggcgaaaaatgagtcgccgtttgagatcaatacccgcatcagctatgccggtgatacgcattcggacatcgacctgaaagcgctgaattacgaacaaggcactgacaaagtcgccttcagcggcggcaatttccagcttgatgccgatcgtgacggcaagactgtctccctgaccggtgatgccgcaagcggcctggtgaattcagtcaatgaatataaccagaaagtccagcttaccttcaacaacctcaaagccagcggcaacagccgtatgaccgattttgatgagcgtatcggcgaccagaagctgagcctcgataagatcgccattgcgattgaaggcaaagagatggcggtgctggaaggcatggatctggacggcaagtccgacgtgtccaaagacggtaaaagcatcaacacccagctggattacagcctgaaaagcctgaaggtacaaaatcaggatctcggtaccggtaagctgtctctgaaaatcggcaacattgacggccaggcgtggcacgaatttagtcagaaatacagcaaagagagccaggctctgctgaccgatgccgccctgcaacagaacccgcaggcgtaccagcagcaggcgatgacggtgctgtttaataacctgccgatcctgctgaagggcgagccggtgattaccgttgcgccactgagctggaaaaacggcaaaggcgaaaccaacttcaacctgtcgctgttcctgaaggatccggccgctgcgaccggcgaaccgcagaccctggcgcaggaagttgaccgcagcgtgaaatcgctcgacagcaagctgaccatcccgatggatatggcgaccgagttcatgacgcagattgcgaaacttgaagggtatggtgaagaagatgcagggaaactggcaaaccaacaggtgaaaggcctggcggcgatgggccagatgttccgcatcacgaaggtggaagacaacaccatttccaccagcctgcaatatgctaatggccaggtgacgctcaacggcgacaaaatgccgctggaagagtttgtcggtatgtttggtatgccgacgctgggcattccggcaccggctgaaccggcagcgccgccggcagtaccgcagcagtaaacgaaaacccctcgcatgaggggttttttattgccgggtggcgctgacgcttacccggcctccgatcctgagtcgttgcaggcccgtgcaagcaaagcgtttacttcaccgtcactaaccgtgcagccacaatctgatgcccggcctgcacgtccgtattttcaatgcgctgcatgatcctgtctgccagggtgtaccccatctcacgagccggcgtcgtcgcccagacgatagggagatcgtctaacgcattttcaccgacatccgcaaatgcccccagcgccacctgatggccgaagaacgtttctaccccgccctcaccgctctggcgtccggcgcggattaaaccgaaccacgcccccatcgcaatgacgtcgttatagcaaatcaccgcgctgatcgtcgggctgttgcgaagcagcgtgccgatggcttctgtggcttttttctggctggattcacactccaccacccattcgctgtgaaacggcaggccgtatttgatgagcgtggagcagtaaccgcccacccgctcggcacgcgtcagggacgagcttttaccgccgagccaggcgatgcgctgatggccgcgatgaataagatgctcggtcagcatttgcgcggcctgcatgttatctggccgaagggtatcggcttcgtcgagatagctggcgcgcgaggcaaacaccagcggtacgcctttctgcgccgcgcgctcacacaattcactgcccacgccggacgcgccggccacgatcaccccatccaccccttgcgtcagcagcatatccagcccggagagcagctgctccggttcgcgcccaccgtggagcaggaaaaccattcgcccctgcgcttcaagcgcctcggtnnnnnnnnnnnnnnnnnnnnnnnnnnnnnnnnnnnnnnnnnnnnnnnnnnnnnnnnnnnnnnnnnnnnnnnnnnnnnnnnnnnnnnnnnnnnnnnnnnnnnnnnnnnnnnnnnnnnnnnnnnnnnnnnnnnnnnnnnnnnnnnnnnnnnnnnnnnnnnnnnnnnnnnnnnnnnnnnnnnnnnnnnnnnnnnnnnnnnnnnnnnnnnnnnnnnnnnnnnnnnnnnnnnnnnnnnnnnnnnnnnnnnnnnnnnnnnnnnnnnnnnnnnnnnnnnnnnnnnnnnnnnnnnnnnnnnnnnnnnnnnnnnnnnnnnnnnnnnnnnnnnnnnnnnnnnnnnnnnnnnnnnnnnnnnnnnnnnnnnnnnnnnnnnnnnnnnnnnnnnnnnnnnnnnnnnnnnnnnnnnnnnnnnnnnnnnnnnnnnnnnnnnnnnnnnnnnnnnnnnnnnnnnnnnnnnnnnnnnnnnnnnnnngttctgcataaaacggcgacgcgaggtcgcgaacgatcagccctatcaccccgctttgcccaccgcgcagcgccgacgcctggcgattacgcacaaagcctaactgctcaacggcctcgttgacgcgctgacccgttgcaggagagatgcgccccttcccgctcaataccagcgaaacggtgctgacggaaacccccgccgccagcgcgacatcgttgatggtgatctttttcgctacagccatgtggtggcgtgactccttgataatgagatcgctaaaacgttttatcaatacgttatctttatactaccagtaaaagcctgagaatgtgatttagcgcgcactaaagtttgataaaacgttttatcttctcgccccatcgaggtcgttaaatctctttctaccatttaaggagtcgttttatgacgacgaaagcagcacaaaaaatatcgctgtgggagtttttccagcaactgggtaaaacctttatgctgcccgtggcgcttctctctttttgcgggatcatgctggggatcggcagctcgttaagcagccatgacgtcattaccctgatccctttcctcggaaatccggtacttcaggcgatcttcatctggatgagcaaggtcggctcttttgcctttagcttcctgccggtaatgttctgtatcgccattcctctgggtctggcgcgcgaaaacaaaggcgtggcggcgtttgcgggcttcgttggctatgcggtgatgaaccttgcggttaacttctggctgactgccaaagggatcctgccgacgaccgacgcggcggtactgaaagccaataacattcagagcgtgattggtattcagtccatcgataccgggatccttggagccgtgatcgcgggggtgattatctggatgctgcacgagcgcttccacaacatccgcctgcccgatgcgctggccttcttcggcgggacccgctttgtgccaatcattacgctggttgtgatgggtctgtttggtctgatcatccctctgatttggccgatttttgccatggggatcaccggtatcggccgcattatcaatggcgcgggtgatttcggcccgatgattttcggtacgggtgaacgtctgctgctgccatttggtttacagcatatcctggttgccctgatccgctttaccgaagctggcggtaccatggacgtttgcggtcattccgttagcggtgcgctgaccatcttccaggcccagctgagctgcccgaccactcacggcttctctgaaagtgcgacgcgtttcctctctcagggtaaaatgcctgccttcctcggcggcctgccgggcgcagcgctggcgatgtaccactgtgcccgtccggaaaatcgtcataaaattaaaggtctgctgatctccggcgttattgcctgcgtggtgggcggtacgacagaacctatcgagttcctgttcctgttcgtagcgccggtactgtacctcatccacgccgtactgacgggcctgggctttaccgtgatggctgtgctcggtgtgaccatcggtaacaccgacggtaacgtgattgacttcgtggtattcggtatcctgcacggcctgtccaccaagtggtatctggtgccggttgtggccgccatctggttcgcggtttactacgggatcttccgcttcgccatcacccgctttaacctgaaaacgcctggccgcgataccgatacggccaccagcgttgaacaggcggtagccggcaccattgggaaatccggatataacacgccggctattctggcggcgctgggcggtgcggataacattacctctctggataactgcatcacccgcctgcgtttgtcggtggcggacatgtccaaagtggataccaacgcacttaaagctaaccgggctattggggtggtacagttaaatcaacacaatttgcaggtcgtcattggcccgcaggtacagtcagtgaaggatgagctggcaaccctgatgcgaaccgtcgaagcctgatgcctcgcccccctcgtcatgagggggttttactttacggagcaccgtcatgtttgatttttcaaccgtcgtggatcgacacggcacctggtgtacccagtgggattatgtcgctgaccgttttggcgctgccgacctgctgcccttcaccatctctgatatggatttcgccaccgccccctgcattaccgatgcgctgcaccagcgaataaaccacggggtgtttggctacagtcgctggaaaaatgacgaatttctggccgccgtggcgcactggttccggcaacgctttaacagtcagattgataccgaaaccgtggtgtatgggccgtcggtcatttatatggtctcggagctgatccgcctctggtcctcgcctggcgacggcgtggtggtccataccccggcttacgatgccttttataaagccatcgacggcaaccagcgtaccgttgtttccgtgccgatgcagaaaacagcgcatggctgggagggcgatatggccgcgctggaagcggcgctgtcaaaaccggaaaacaaggtgctgctgctgtgtagcccgcaaaacccgaccggcaaagtctggacgcgggaagagctgaccacaatggcggccctgtgtgaacgttatgacgtagcggtgatcagcgacgaaattcatatggacatggtatggggcacgcatcgtcataccccgtggaatgaggttgcacgcgataaatgggcgctgctgacctcgggttccaaaagcttcaatattccggcgctgacgggtgcctgggggcttatcgccgatgacgccagccgtagcgcctatctgaatgcattaaaaggtcgggacggactctcttccccttccgtgctggcgctgaccgcgcacattgctgcctaccgacagggagaaccctggctggacgcgctgcggacctatctcgaagaaaacctgcgctacattgctgacgaactgaatactgcatatccgacactcaactggcaaccgcctgaggccacctatctggcatggatcgatctcagcccgcttggcattgatgacaatacgctgcaaaacgtgctgattgatcagcaaaaagtggccatcatgccgggatatacctatggggatgaaggtaaaggctatgtgcgtctgaacgctggctgtccgcgtagtaagcttgaacagggcgttcaacgccttatcgctggcatcaacactctgctgtaaatcatttgcgcaacggaatattcccttgcgcaaatagctttttaccccgttttgtttttataatatggcgcactttaaccagcaaagagtgcgaccatgattgatacacgcctgcctttaactgatattcaccgccacctcgacggaaacattcgtgcccaaaccattctcgatcttggtcgccagttcaatttaaccctccctgccgaaacgcttgaaaccctgatcccgcatgttcaggtcacgtcgaacgaaccggatctggtgagttttctgagcaagctcgactggggcgtgaagatgctggcctcggtcgatgcctgtcgccgtgtcgcctttgaaaacatcgaagatgccgcgcgtaacggcctgcactatgtcgaactgcgtttctccccgggctatatggcgatgacccacaacctccccgtagcgggcgtggttgaagcggtcattgaaggcgtgcgtgaaggctgcaaaacctttgacgttcaggcgcgtttgatcggcattatgagccgtaccttcggtgaagcggcctgtcttcaggaactggaagcattactggcgcatcgcgaccagatcaccgccatcgacctggccggtgacgagctgggcttcccgggcagtctgttcctgtctcatttcaaccgcgcacgtgatgcaggatggcatattaccgttcatgcgggggaagccgcggggccggaaagcatctggcaggccattcgtgaactgggtgcggaacgtataggtcatggcgtgaaagccattgaagatcgcgcgctgatggatttcctcgccgaacaacgtattggaatcgaatcctgcctgacctccaatattcagaccagtacagtggcgtcgctggcgcaacacccgctgaaaaccttcctcgaacacggggtgctggcttcgctgaacacggacgatccggcggttcagggcgtggatattattcacgaatacaacatcgccgcaccacaggccgggctgagccgcgagcagatccgtcaggcgcaaatcaacgggctggagatcgccttcctgacgcctgaagagaaacaggcgctgcgcgataaagttgctcagtagtcctctttactgccgggtggcgctgcgcttacccggcctacgaaagcgtttggcacttatgccagacagagcgttgcgcgatgtttggcagattcgatcccgagctcgatgagctccataatctggattgcctggcttgcgggaaccggattttcacctgaaccgttcagcgcgtcacgaatggcggcgtaatacgctggatagttccccggcagggtcaataccgtctcttcaaccagtacctcaccctccgcacgcgtcaccaccccgtcgcgcatgtcgtagccccagtcctcctgcggtaagcgttcgccatttttgaggcgctcttcctgcggatccaggccgaacttcacatagctgccgcgcgccccgtgaatgatatagcgggccgattccgccgccgcaagcattgtcccgtgcagcacaatgcgccgctgcggataactcaaaatggcatggaaatagtcggtggtctgcgcccccggcctgagctgcgctaaatcgaccgtcatgctcacgggcaaaccaaacagatgaacggcctgatcgagaagatgcggcgctaagtcataccagatgccgctacccggtcccgcctgctcgcgccagcgatctcgcacctgcggacgataacgatcgaagtgcgactcnnnnnnnnnnnnnnnnnnnnnnnnnnnnnnnnnnnnnnnnnnnnnnnnnnnnnnnnnnnnnnnnnnnnnnnnnnnnnnnnnnnnnnnnnnnnnnnnnnnnnnnnnnnnnnnnnnnnnnnnnnnnnnnnnnnnnnnnnnnnnnnnnnnnnnnnnnnnnnnnnnnnnnnnnnnnnnnnnnnnnnnnnnnnnnnnnnnnnnnnnnnnnnnnnnnnnnnnnnnnnnnnnnnnnnnnnnnnnnnnnnnnnnnnnnnnnnnnnnnnnnnnnnnnnnnnnnnnnnnnnnnnnnnnnnnnnnnnnnnnnnnnnnnnnnnnnnnnnnnnnnnnnnnnnnnnnnnnnnnnnnnnnnnnnnnnnnnnnnnnnnnnnnnnnnnnnnnnnnnnnnnnnnnnnnnnnnnnnnnnnnnnnnnnnnnnnnnnnnnnnnnnnnnnnnnnnnnnnnnnnnnnnnnnnnnnnnnnnnnnnnnnnnnnnnnnnnnnnnnnnnnnnnnnnnnnnnngataacgatcgaagtgcgactcaaaaaaggcaatttcgccgagcgtgccttcgtttatcagcgccttaaccgtcaggaaatcgctgtcccagcgccgattgtgaaagaccgataataaccgacccagacttcgcgccagcgcatccagctcgcgcgcctgtgacaacgtcacggtgaagggcttatcgacaacaacatgtttccctgcctccagcgccgctttcgccagggggaaatgagtgtcgttaggagtaggaatgacaataaggtcaatattaggatcgttaaacagatgcttaggctccgttaccaccggcacggctggccagtcggcgcggaccttagtctcatcgctgcttgtgatagccgccagttccattcccggcgtgccggcaaccagcggagcatgaaaggttttgcttgcgtacccgtagccaataagaccgacgcggatgttttcactcatcgtttgccccctcgctgtgcgcttatttatcactggccttgtgcttaacgcacagattaataatgtgccctgtgagtgaaaatagcatctcgcgacagcgttttttgtttacctcgccttaaagtgtgtatatgggttcggggaatcgttcccaaagcgcttgctctggcgaaaagggcgctgtaacatttgtaatctgtatttatggataaattacaaacacaaattatgtcgtcaataattaatcgaatcattgaattagcgggatggattgtccttggggtttcagtcgtgttgctcggcattgccagccatatcgataactaccagccgccggagcctgttactgtcgcacaacaaaagtaagccgtgtcgtcataaagcgtgacacattacgtcatggaacgtattgccagccgtaatgaacggggttacccttctcttccaggcatctgctgatgcctgattcttcgcaaagaaaactcctaatttcgtcgcgttacccgagtggacagtttacgtctttattaatccgtttattattcgaacgcattacctttatgggtattacccttttatatggaaacttattaatatgacagttcaggactatttattaaaatttcgcaagatcaattcccttgaaagcctggaaaaactgtttgaccatctgaactacacgctgtcggataatcaggacatcatcaatatgtaccgcgctgctgaccaccgtcgcgccgaactggtctctggcggtcgtctgttcaatgtgggggaagtgcctaaatccgtatggcgttacgttgtataagaaagtagccttcggcgtgaaatgttatatactctccgccctgcaaatttctgtataacatttcgcgcagactatgggagagcgtatgaccgcattgcctggagagagaattgggggctggttaatcgccccgctggcatggctgctggtggcattattaagcgcttcgctggcgctgttgctttacaccaccgcactggttacgcctcatgctatccagacactgatgtcccagagtgcgctcaatattgcgacgtggtttgtgtcgttcgttttcgcgatcgcgatgtggtactacacgctgtggctgactatcgccttcttcaaacgccgcaaaagcgtgccaaaacattacattatctggctgctggtctccgtgctgctggctgtcaaagcattcgctttctcgccagtgtctgacgcgctggcggttcgccagttactgtttccgctactggcgacggcgcttctggtcccttatttcaagcgttcgacgcgcgttaagaagacctttgtcaacccgtaataaccttacagttaacctgttgtggcctgttgtcgtttatccgataataggcggctattttatttcaggctaaataatgaccgattacttactgctctttgtcggaactgtgctggttaataacttcgtactggtgaagttccttggcctgtgcccgtttatgggcgtctccaaaaagctggagacggcaatgggcatggggctggcgaccaccttcgtgatgacgatggcctccatttgcgcatggctgattgatacctggatcctgatcccgctcgacatgctctacctgcgcaccttgtcctttattctggtcattgcggttgtggtgcaatttaccgagatggtggtgcggaaaaccagccctgccctgtatcgcctgctgggtattttcctgcctctcatcaccaccaactgcgcggtgctgggcgtggcgctgctcaatatcaaccttgggcataatttcctgcaatcggcgctgtacggtttttccgcggcggtcggtttctcttttgttatggtcctgttcgcctcgattcgcgagcgtctggccgcggcggatattcccgcgccgtttcgcggtaacgccatcgctctggtgaccgcaggtttaatgtctctggcctttatgggctttagtggtctggtgaagttgtaatgagtgctatctggattgccatcgcgtccatcagcgtactgggactcgtctttggcatcattctgggttatgcctcccgccggtttgcggtggaggacgatccggtggttgaaaaaattgatgaacttttaccgcagagccagtgcgggcagtgcggctaccctggctgccgcccttacgctgaggcggtgggcgtgcagggcgaaaagatcaaccgctgcgcaccgggtggcgaagcggtcatgcttaaaatagctgccctgctgaacgtcgatccccagcctgtcgacggcgatgaacaggcccaggagcccgttcgtgcccttgctgtcatcgacgaagccaactgcattggctgcaccaaatgtattcaggcgtgtcctgttgacgccattgtgggcgcaacgcgcgcgatgcacaccgttgtggcggatctgtgcaccggctgtaatctctgcgtggcgccctgcccgacgcagtgtatagaactacgcccggttgaaacgactactgaaagctggaagtgggaccttcagaccattccggttcgcaatattcctgtggaacaacatgcttaagttattttctgccttcagaaaagagaagatctgggatttcgacggcggcattcatccgcctgagatgaaatcgcagtctaacggcacgccgctgcgccagatcccgctggcgacccgttacgttatgccccttaaacagcatatcggcgcggaaggtgaactgtgcgtgaaagaaggcgatagcgttcttcgcggccagccgctgacctttggtcgcggacggatgttgccgatacatgccccgacttccggtaaggtggtggctgttgccccccataccgttgcccatccgtcggcgttgtctgagctgagcgtgatcattgaagccgatggtgaagaccgctggatcgatcgtgacggctggagcgactaccgttcccacagccgtgaagcgctgattgaacgcattcatcagttcggcgtggcgggtctgggaggcgcaggcttcccgaccggcgctaagcttcacggcggcggcgataaaatcgaaacgctgatcatcaacgccgccgagtgcgaaccgtacatcaccgccgatgaccgtctgatgcaggactgtgccgcgcaggtggtggaagggattcgcattcttgcgcatattctgcaaccccgcgaagtgctgatcggtattgaggacaataaaccgcaggccatttcgatgctgcgtgcggtactggcagacagccacgatatcgccctgcgagtgatcccgaccaaatacccgtccggcggggcaaaacagctgacacagatcctgaccggcaaacaggtcccccacgggggccgttcgtccgacatcggcgtgctgatgcaaaacgtgggaaccgcctacgcggtgaaacgtgcggtgattgacggcgagccattgaccgagcgcgtcgtcacgctgaccggcgagtccgtctcccgtcccggcaacgtctgggcgcgtctgggtacgccggtgcgtcatctgctggaacaggctggcttctgcccgggtagcgatcaactggtcattatgggtggcccgctgatgggctttaccctgccgtggctggatgtgccggtggtgaagattaccaactgcctgctcgccccttccccaacggagatgggcgaaacgcaggaagagaaaggctgcatacgctgtagcgcctgtgcggacgcatgcccggcagatttactgccgcagcagttgtactggtacagcaaaggccagctgcacgataaagcccaggcgcataacctggctgactgtattgaatgcggtgcctgcgcctgggtctgcccaagcaatattccgctggtgcaatacttccgtcaggagaaagccgaaatctacgccatctccatggaagaaaaacgtgccgctgaagcgaaggcccgctttgaagcgcgtcaggcgcgactggagcgcgagaaacaagcccgtcaggaacgccataagcaggctgccgtccagcctgcggcgaaagatcaggatgccattaacgcagccctggcccgcgtgcgcgagaagaaagccaccgccgcccagacggttgtgatcgctccgggagaaagaccggacaacagcgaagcgattgcggcccgcgaagcgcgtaaagccgaagctcgcgcgcgtcaggcggagaaagcgcaacacgccaaaccggaagctgatatcgacccgcgtaaagcggcagtggaagcggctatcgccagggcaaaagcccgtaaggccggtcagcagacagtggtggttgaacaggaagcgacggatccgcgcaaggcggccgttgaagccgctatcgcccgtgccaaagcacgaaaagcggcacaggttcagccagccgaagagagtgaagcgcctgtcgacccgcgtaaagccgccgttgaagcggccatcgcccgtgccaaagcacgaaaagcggcacagcaggacgaacggcctgcggccgccaacgacgatccacgcaaagccgcagtcgccgccgcgattgcgcgcgttcaggcaaagaaagccgcgcagcaagccgttaacgaggattaaatggttttcagaattgcaagttccccttatacccataaccagcgccagacatcgcgtattatgatgctggtgtgcctggccgcgctgccaggtattgccgtacagtgttggtttttcggctggggtacgcttttccagttagttctgggttgcgccagtgccgtcgcagcggaagctgcgatcctgaagctgcgcaaaatggaagtgactcgcatcctgagcgataactccgccctgttgaccggcctgttgctggccatcagcattcccccgttcgccccgtggtggatggtggtattgggaacggtgtttgcggtgatcatcgccaagcagctgtacggcgggctgggccataacccgtttaacccggcgatgattggctacgtggtactgctgatctccttcccggtacagatgaccagttggctgccgccgcatgagatcgccgccaccgtccccggctttatggatgccctgcacgttatctttaccggccacaccgcgctgggcgcagatatgaacgcgcttcgcatgggcgtggacggcatcagccaggccaccccgctcgataccttcaaaacctccctgcgtgccggacacagcgtggagcaggtgatgaaatcgtctatttacagcggcgtactggcgggtgctggctggcagtgggtcaatctggcctatttgttgggcggcgcgttcctgctgcaacagaaggcgatccgctggcatattccggtgagcttcctggtgacgctggccgtctgctcgacgctcggctgggtcatctcacctgagtcactggccagcccgcagctccatctgctctccggcgcgaccatgctcggggcattctttattctgaccgatccggtcaccgcgtctaccaccaaccgtggtcgtctgattttcggcgcgctggcgggcttgctggtctggcttattcgcagctttggcggttatccggacggtgtggcatttgccgtgctgctggctaacatcaccgttccgctcatcgactactacacgcggccacgcgtgtacggtcatcgctaagggtcacgccatgctaaaaacaatgcaaaaacacggcgttacgctggcgatcttcgctgccgccctcaccgggctgaccgcgctggtaaatgaactgacgaaaactaccattgcagagcaggcaatgaagcagcaaaagacgctgttcgatcaggtgatcccatccgacctctacgataatgacctgcaaaaaagctgctttgtcgtgcaggctccgcagctcggtaaaggaccccatcgcgtttatattgcccgcaagggcgataatcccgtgggtgccgtcatggaagccaccgcgccggacggttactccggtgcgattcagctgctggttggcagcgatttttccggcaccgtgctgggcacgcgcgtgacggaacatcacgaaacgccgggccttggcgacaaaattgaaacacgcttaagcgactggatcttacacttcgccggtaagatgattcatggcgaagacgatcctgctttcgcggtgaaaaaagatggcggcgagtttgaccagttcacgggtgccacgattaccccgcgcgcggtggtcaacgccgtcaagcgcgccgggctgtatgccgaaacgctgcccgcgcagatcaatcatctttccacctgtgaggagtgaccatgagccaggttaaagaggttatcgtccagggtctctggaagaacaactccgcgctggtacagctgctggggctgtgtccgctgctggcggtgacgtctaccgccaccaacgcgctcgggctggggctggcgaccacgctggtgctgaccctgactaacttttccatttctgttttgcgccgctggacgccgtcggaaatccgtattccgatctatgtcatgatcattgcgtcggtggtcagcgtggtgcaaatgctgattaacgcctacgcatttggcctgtaccagtcgctcgggattttcattccgcttatcgtgactaactgtattgtcgtaggccgcgctgaagcctttgcggtgaaaaacaatccggccatatccgcgctggatggtttttccatcggcatgggcgcgactgccgccatgttcgttctcggttctctgcgtgaaattttgggcaacggtacgctcttcgacggtgcggacgcgctgcttggcggctgggcgaagtcgctgcgtattgaggtgttccatacggacactccgttcctgctggccatgctgccgcctggcgccttcattggccttgggatgatgctggcgttaaaatacctgattgatgaaaaacgtaaacgccgcgccgctgagcgcagcgtacaggaagggatccccgagaaagcagtatgaataaagagaaacgcattgcgatcctgacgcgcctgcgcgatgagaatcctcatcctacgacagagctgaactttaactcgccgtttgaactgttgatcgcggtgctgctctctgcacaggcgacggacgtgagcgtcaacaaagccacggccctgctctaccctgtcgccaatacgccgcaggccatgctggagctgggcgttgaaggtgtgaaatcctatatcaagaccattggcctgtttaacagcaaggccgaaaacgtcattaagacctgccggatcctgctggagcagcacggcggtgaagtcccggaagaccgcgctgcgctggaagcgttgccgggcgtcgggcgtaaaacggcaaatgtggtgctgaacacggcgtttggctggccgaccatcgccgtagatacccatatctttcgcgtctctaaccgtacccggttcgcgccgggtaaaaacgtggaagaggtggaagagaagctgttaaaagtggtccctgcggaatttaaggtggactgccaccactggctgatcctgcacggacggtatacctgtattgcccgtaagccacgctgcggttcctgcattatcgaagatctctgcgaatacaaagaaaaagtctatccctgagcgtaaaccacctaacttcttacctgttcaagcccttaatattaacaagggctctgatatcttcccgattgaccataaattgccctctctttctccttaacgcattgtcgattcttcggtcatttaacactcaaagaggttaatagttttttcatcaccaaaaatttctatacatctgtgatcgcgatcactctgataacctgatgttggatttttgttgttaaaacccgcccaacccctttgtcagacaagatttcatcgattccataccgcacataagaccagtcatttttcagaatatgggctatatcactgccaatcacccaaaatagcagaacatatcgccatacagccgttgaacagggtcgtttacagtgaaaaaaaccatcaattttgaacggatgagatttaacgctgtataacatttgcatgaaccgatgattataccgccagagttatatgtaacagattattacaaacgtattgccagatggggctggatagtgaacattacccgccgtttcccctcccaatataactataaagcggatggactacggtcatcacgctatgaacacccccgttaatatgggatgtaaaaaaagaggtatatgtgtctactgcaaacaataaaccaacagatgagagcgtaagtcttaacgctttcaaacagcctaaagcgttctatctcattttctcgatcgaattatgggaacgttttggctactacggcctgcaagggatcatggcggtttacctggttaaacagctgggtatgtctgaagccgattccatcacgctgttctcttccttcagcgccctggtgtatggcctggtcgctatcggcggctggttaggcgataaagtcctcggtactaaacgagtcattatgctgggcgccgttgttctggcgattggctatgggctggttgcctggtccgggcacgatgcaggtgtggtttacatgggtatggctaccatcgcggtaggtaacggcctcttcaaggcgaacccgtcttccctgctctctacctgctacagcaaagatgacccgcgtctggacggtgcatttaccatgtactacatgtccatcaacatcggttccttcttctctatgctggcaaccccatggctggccgccaaattcggctggagcgtagcgtttgcgctgagcttcgtgggtatgctgatcaccgttgtgaacttcctgttctgccgtagctgggttaaagactatggttcaaaaccagacttcgaacccgtgcacatgggcaaactgctggcaaccatcgtcggcatcgtgatcctggccgctgttgccacctggctgctgcataaccagggcgtagcacgtgccgtactgggcgtggttgcgctgggtatcgtgattatctttgcgaaagaagccttcgcgatgcagggtgcggcacgtcgtaagatgattgtggcgttcattctgatgctggaagcgatcatcttcttcgttctgtacagccagatgccaacgtctctgaacttcttcgctatccgcaacgttgagcactccatcctcggtatcgcgttcgagccggagcagtatcaggccctgaacccgttctggatcatgattggtagcccgattctggccgctatctataacaagatgggcgaccgtctgcctatgccgcacaagttcgctatcggtatggtgctgtgctctggcgcattcctggtgctgccgctggggacgaaattcgcgaccgacgcgggtatcgtgtctgttaactggctgatcctgagctatgcgctgcaatctatcggtgaactgatgatctccggtctgggcctggcgatggttgcgcagctggtccctcagcgtctgatgggcttcatcatgggtagctggttcctgaccaccgctggcgcggctatcatcgcaggtaagattgcgaacctgatggcggtaccagacaacgttaccgacccgctggtttccctgaatgtctacggcaccgtattcatgcaaattggtatcgcgaccgccgtgattgccgtgctgatgctgctgaccgcacctaaactgaatcgtatgacccaggacgacgacaaatccgctaaagcgatcaaaaccgcgaacgcgtaatgtcatcgggaaacgactgaacagaagccgctaattgattagcggctttttttttatccgaacgcgcactaacatagctggaacctcagcaaaaaggagttaccgatgaaactgttctataaaccgggcgcctgctctcttgcttcccatattacgcttcgcgagagcggtaaagatttcacgctggacggcgttgacctgatgaaaaagcgtctggaaaacggggatgacttttttgcgattaacccaaaaggccaggttccggccctgctgctggatgatggcaccctgctgaccgaaggggtggcgattatgcaattcctggcggacaacgtaccggatcgtcagctccttgcccccaccggcagcattgcgcgttataaaacgctggagtggctgaactatattgccaccgaactgcacaaaggctttacgcccctgttccgcccggacacgccggaagagtacaaacctaccgtgcgcgcgctgctggagaaaaagttgcagtacgttaacgacgcgctgaaagacgaccagtggatctgtggctcgcgtttcaccatcgccgatgcctatctgtttaccgttctgcgctgggcgcgcgcggttaagctgaacatggaaggattagaccatgtcgcatcgtatatgacgcgcgtggcggagcgtcctgcggtggcagcggcgctgaaagcggaagggttgaattaaccgagcggcctggattgccgggtggcgctgacgcttacccggcctataaattccgtaggcccgtgcaagcgcagcggcgccgggcgttttctaaagctgcgttgcgctaaaatagtgctccggcttcgcgatgcgatcctgcgccgcgacgacctggagctcatattcctgcatcgtcttcgtcgcaatcatgatttcataaacggctgcggtgacgtgctccagcgcatcgcgcaggctcgcgccctgcaatagcttcaccagcagcaaaccgctggtcacatccccgaccccgacaggctgacgtgcaccgaaatccaccagcggtcgactgatatgccaggcttcatccttcgtcaccagcagcatttcaaaacggtcctggctcaaccctgcgcgtgccaggtgcttaaccagcacaatctctggcccctgggcgatcagctcacgagaggcgcttacagcctcttctacgctgttgaccggatgctcgcacaggatctcaagttcaatcaggttgggggcaataatatcgctggcgggcaatgcatgacggacatgaaactccgcaacgcccggcgctacgatgcagcctttttccggatgtcccatcaccggatcgcagaaatatttcgccgcggggtttgccgctttcacctggcgcacaatgccgaggatatgttccccctgctccgccgaacccagatagccgctcagtacggcatcgcagcgtttaagctggtcgatatccgcaatcccctgaacgatttccgtcagatgcgacggcggcattacgcagccggtccatttaccgtactgggtgtgattcgagaactggacggtattgaggggccagacgttaacgccgaggcggcgcatcgggaattccgcagcgctgttgccagcatgtccaaacacaacgtgggactgaatggcgaggatgttcttcatgttgtacttaccaaaccctgtcaaaacaaaaggggcgtggtttcccacgcccctgcatacttttaattacttccagcagaccaggcagtaatttttcttaccgcgacgcagcagcgtgtagcgaccatagagacggtcgttctcggtaaaggtgtattccggatcggcctgtttttcgccattaatggtgatcgcgttagaggcgatggttttacgcgcctgaccgcgagacggctggagctcggagtccaccagcgcctgcatcagatcggcgccttttttccatctcaaccatcggcacgccatcctgcgccagctgttcgaaatccgcttcgcttaaatcgctcagggttccgttgaacaggctagccgtaatgcgcttcgccgccgccagaccttcttcgccgtgaaccagtttagtcacttcgtccgccagcacgtactgggcgcgtggtgctttaccgctgttcttgtcttcttcttccagcgcattgatttcttcgatatccataaaggtgaagaacttcaggaagcgataaacgtcggcatccgccgtgttgatccagaactggtagaacttgtacgggctggttttcttcggatccagccataccgcgccgccttcggtcttaccgaacttggtaccgtcggctttggtgatcaacggcacggtcagaccaaacacctgattctggtggaggcgacgggtcagatcgataccggaggtgatgttaccccactggtcggaaccgccaatttgcagagagacgccgtgcagtttgttcaggcaggcgaagtcatacccctgcaacaggttataggagaactccgtgaaagagataccctgatcgtcacggttaagacgctgctttactgcttctttgttaatcatctggttaacagagaagtgtttgccgatgtcacgcaggaacgtcagcacgttcatgccaccaaaccagtcgtagttgttcgccgcaatcgcagagttgtcaccgcagtcgaaatccaggaacggtgcaacctgtttacggatcttatccacccactcctgcacggtgtcttcggtgttcagcttacgctcagcggctttgaaacttgggtcgccaatcagaccggtcgcgccgccaaccagtgcgacaggcttatggccggccatctggaagcgtttcaggcataacaatggaacaagatgccccaaatgcaagctgtcagcggtgggatcgaagccgcaatagagcgcgatcgggccttgcgccagtcgctctgctaacgcttcctcgtccgtcacctgggccacgaggccccgctcttgcaattgtttaatcaagttactgcttgccatcaaattctccatgtataaacgactgcacctttgccggtacacgacttttcgcctgatgcgaaaggaccatagaataaagcgccagcgcggtgtgcgctagcgcttaaatcaacaaattttggggattacggggccagtctgtcgattttccagccaccgttgtcgcgctggtataaaaagcggtcgtgcaggcggtgttcaccgccctgccagaattccatctgctcaatggggatgcggaacccgccccagaaactcggcagcggtacttcaccctgctgaaacttctgtttgagttcgaggaatttactttccagcacaccgcgggctgagattcggctggactgtttagagacccaggcgccgatctgactgtcgcgcgggcgactgtggaaatattttaccacttcgagcgtagagaggcgctccgccttgccggtgaccatcacctggcgctccagcatatgccacgggaagagcaggctaatacgcggattattttcaaggtgatgcgctttacgactgccaagattggtgtagaacaccagccctttctcgtcataatgcttgagaagaacgatgcgttgatacggctgaccattttcatcaaccgtggcaacgaccattgccgtcgggtcagccagtttcgcttcgcaggcctgcttcagccagcgttcaaaaagcaccagcggttcggcgggaagatcctggcggcgcagaccgcctttggtgtattcacggcgcagatgcgcaatttgctgtagttcgtcgttatctgacatggcgttagctgaaagtgagattgggtggcgctattgtgcgcgcccccttcaaaaatctcaacgcttcggattttcaagctgacaattgttcagcacaatgcggtcacgcttgtagacggtggcgctgtcgcctttcgaccagaagacgtagatcccgtctgagtagcgcgcaccggaggccgacattccctgcttcagcgttaacaacttattgtcataaacaaagctggcttcctgatgcgggttgttcagcttcaccgtcagcggtttttcatcacaacgatattccagcgtatcggtttgcatacgctcaacgaactggttatagacgctgcatccggtcataagaaaaggtacagcaatgagaagaagttttttcatgggcagattccgaagactatcctggtcctggagggcctaaccgccctcctgtttttccctattttacgggttacgcctcccgctgaatttcagttaactctgattatggcgcgggtttgcggggaaaatggccccaaggacgctcgcctcccgcgcaccggttacggagggtaaattccccggcagaccggcaaccgtacgccaggcaagccaggcgaaggccagcgcttccatatcgtctccgctgatcccggcttcatcagtggtcgtgacttcggtgcctggcagcaaggcggcgaggcgtgccatcaccagcgggttgcggcttccgcctccgcataccagcaagcgctcacatccgccgctcagcaacacctgttcagaaatcgacaccgcggtgagctccgtcagcgtagcctgcacatcctgaggcgcaaggccggggaagcgcgccagctgacgttcaagccagccgtagttgaaatattcccgccccgtgcttttcggcgcgggcagagcaaagaaaggatcgcttaacagggtttgcagcaagggaaggatcactttcccctggctggcccactgcgcgtctttgtcgtaggctttgccgctctgacgccagatccaggcatccatcagcatattaccgggtccggtatcgtacccccgcacgggctgcccgggaataagcatcgacaggttggcgatcccgccgatgttcaggaccatcctgcgctctaccgggtgcgccagcagcgcctgatgaaatgccggaaccagcggcgccccctgcccgccgagggccatatcgcgacgacggaaatcacccaccaccgtcacgccggtttttgccacaatctggttgttatcgccaatttgcatcgtgtgcggcgcctcgccgacaggttcatgccagacggtctgcccatggcaacctattgccacgatatcctgcgggtggagtctttcctgctgcatcagggccagtaccgcctcagcaaacagcgcccccagacgcacatccagttggcccagttgggaaagcgtcagctgttgtccctggcagatgttcaggatctcttcttttaacgagacaggaataggccaggtcaggcttgcctgctgcgccaccatgttttcatcaatggcggccagaacgacatccacaccgtcaagactggtaccagacatcacaccgatatagcgacccgatttcatgcgctttccttacgttacatgggctaagtgcaaacactccatcataaataacgcggctttgctatgcggtgataatattttttaacaatctcagacctgtagcacagacggtttttgtttatgtcccgttaagccctgctgaagtaaaatttatctattcggcatgcaaagatatgaactgtggtcaggaatgccatataatttagccataacggatgccccaaccgggcgttttttggtgaacaggagagtcaaatgattttacgtgtactgggcgtttcgctgattggtttaacactggcgggttgtgtgaatgacagttcactctccggcgacgtatatagtgcttctgaagctaaacaggtacagaacgtgacatacggtactatcgttaatgcccgtcctgttcagattcagggtggcgatgacacgaacgtggtgggcgcaatcggtggtgctgtgctgggtggtttcctgggtaataccattggcggcggcaccggacgttctctggctaccgcagcggccgcagttgcaggcggcgtagcgggtcagggcgttcagggtgcgatgaacaaaactcagggcgttgagctggaaatccgtaaagacgatggcagcaccattatggttgtgcagaaacagggtaacacccgcttctctgctggccagcgtgttgtactggcaagcaacggcagccaggttaccgtctccccgcgctaatatcctgatggatgtggtctgttcagaccgcatccatttaacaaaatcatcgtctccaacaatatatttgcacaatacattcacacggtgaattattcatttcatcttatttttgtccgtgcgcaaagtattttttatttccctcacttaaactcttcgcaatctcttttcttttttaatttttaaattctctatgcttgcgatctgtcgatttgtaaagaaccgctttgtggccttcgcgcttggatgcattgttatcattgccgtattacaagctttttttataaaacttgttgaatgggttccttcgttttcacctttgtttttccctacgctgacgatatttcttctggtgtttcatctgtttattgcctgttttatggcaatgaaatactggtgcgacagaaggcgattatatcttgttcccattgccctggcctttgccggctcagcgttattgatggtggggactctgtccagcttcccggcctggcttgatctctatcagttcaacgtggcgaactataatgacgccatgattttctatatgttccgccactttttaatggcggtgctgataatcatctcggcattgctgtataccctgcgtacgtccgctctctcacgaagcacccacatcggtatcgttgtcggcgcctcgctctttacgggcagtatgcttgggctggcattgttctattccagccattcaaccctgctcacactggacctggtagacaatgaaacccgacagtttatggttctctggagccaggcgattaatattattttgatcgtcctgtgggtagtaacgttaatcaccctgatggccattacccgcgtgagaaatttgttttgggtcggcggcaattttttatgcgtctgttatatcgtcaccctgctcatgctattgttaggcggacacgctgaagatatttcatggtaccgggcacggttattcgaaactgtcgctacattaatcattatcttcatcttactttccgatgtatttaatttgtatcgtgactcgcatgtaaaatatcagcagtcttatcaaaactcgatccgcgatcccctcacccgtctgtataatcgtagctatttctatgattcattaaaccacgcgctgagtacagcaaccctggcgcacccggtatcggtgatcgtgagcgatcttgaccgtttcaaacgcattaacgactgctacggccatttgcagggggataaggttttacagtttgtctcaaacctgttgaccgattcagtgcgaccgcaggatatcgcagcgcgnnnnnnnnnnnnnnnnnnnnnnnnnnnnnnnnnnnnnnnnnnnnnnnnnnnnnnnnnnnnnnnnnnnnnnnnnnnnnnnnnnnnnnnnnnnnnnnnnnnnnnnnnnnnnnnnnnnnnnnnnnnnnnnnnnnnnnnnnnnnnnnnnnnnnnnnnnnnnnnnnnnnnnnnnnnnnnnnnnnnnnnnnnnnnnnnnnnnnnnnnnnnnnnnnnnnnnnnnnnnnnnnnnnnnnnnnnnnnnnnnnnnnnnnnnnnnnnnnnnnnnnnnnnnnnnnnnnnnnnnnnnnnnnnnnnnnnnnnnnnnnnnnnnnnnnnnnnnnnnnnnnnnnnnnnnnnnttgtgctcatgctgacaaataccccttccgatcttgcgcaacaggttgccgaacgcatacgtctcaaattgagcggtttcgacaacgttagcagcggcggttatctcccggaaccgataactatcagtatgggggtattcaccgccacctcgccggagaccagcgctgaaacctgtgtggaaagcgcggataaagccatgtacgaggcaaaagagacgggccgcaaccgggtggtggtgttcagaacatgacagaggccttgcaccagcaaggcctgtgaataatgtcagtcgcgcgactgtaaatcgtggatgttttgctcaagacgggcgatgagtccgatcagcatttccagctcagcgggggaaataccggccaggatctcccctcgcgttttactgatgacggtttccatctcagtgataatcggggccgctttttccgtcaatttgatccgcttggcgcgacggtcgctggcgcaggtttgtcgggagatgagtcccttctcttccagctggtcaagggtacgcaccagagacggctgctcaattccaatcgcttttgccagttggatctgtgactgatcgggcgggagctgatgaatgttatgcagcgtaacccagtgcgtctgcgtaagttccagaggtttcaggcgatggtcaatcagagcacgccagatgcgtaccaaccttgccagatcagaacctaatggcgattccaatttcatctccttataattagcttgctaagtgattatagtgattttagaatagtttgcagtatttgtattgccaaaacaaatgcaatcacggtattcatcattccttaaaggatgatttacactgaatggtaatgcgccatcgcattgaaatctgccaatgtggccctcattccaccgcaaaggatcgctgcttgtgacgttgttttccttctccgcagggttgcccctccaggatttgattgttggcgcatcggtctactttccgccactgtttaaagccgtgatggtcggttttgtaatctggctcattacgcatcgtctgctgcgcgactggatgtattctggtgaaatctggcacccgatgttaatggatctctccctatttaccctctccgtctgtcttggccttgccgtgttaaccgtgtggtgagaatagcattgaaaacgttaaaatatttttccactcttttcgttttagcgctggcggtgatggccggctggtggctctggaattattacatgcagtcgccctggacgcgtgacggcaagatccgcgcggaacaggtcagcatcacgccacaggtgtccggcagtatcagcgcgcttctggtgaaggacaaccagtacgttcatgcgggcgatgtgctattccgtatcgatgagacccctttccacattgcggtgcttaatgcccaggcgcagctcgcaaaagctcaatcagatctggcaaaagccaataacgaagccgaacgccgccgccatctgtcgagaaattacatctctgcggaagatctcgataccgccaatatcaatgtaaaagccatgcaggccagcctgaaggttgcagaggcaacgctgaaacaggccgagtggcaactgacccagaccgtggtcaaagccccggtggatggatggatcacgagcctgtctacccgtgtgggtgattacgccaccacaggccagccggtcttcgccctggtcgatagccactctttctatgttgtaggttattttgaagagaccaagctgcgccatatccgcgagggtgcgcctgcccggatcacgctttacagcggcgcagaaacgttacagggtcacgttagcagcataggtcgggcaatatacgatcagagcgtggaaaccgattctggcctggtgcctgacatcaaacccaacgtcccgtgggtgcgcctggctcagcgggtgcctgttcgcgtcgagtttgatcagctgccgaaagacattaccctggtctctggcacaacctgcaccgtcgccatcggatcgcgatgatgaacctgggggctttctcctggcgcaatacgccgtggataaaagcgacacggccgcagtggcgttacgcgctgcgcaacggcatcgccatgtgccttgcgcttacggttgcctattatctgaatctggatgagccttactgggcgatgacctctgcggcggtcgtcagcttccctaccgtcgggggcgttatcagtaaaagcctcgggcgcgtggcgggtagcctgctgggggcaaccgccgcactgcttcttgccggccataccctgaacgatccctggctctttctgttaagcatgtcggcatggctggggctgtgtacctgggcctgcgcccattttaccaataacgttgcctatgcgtttcagctggcgggttacaccgcggccattatcgcctttccggtcgtcaacgtgctggacaccaccgagctgtgggatatcgcccaggcacgcgtgtgtgaagtgatggtcggcattctgtgcgggggcgtcatgatgatgatcctgcccagtacctcagatggcactacgcttatcaccgcccttaaaacgatgcacgcacgtttgctggaacatgccagcctgctctggcagcctgacagcagcgatgacatccgcctcgcgcacgaaaaggtcatcggccagatcctgaccatgaacctgttgcgcatccaggctttctggagccactaccgttttcgtcgccagaacacgcttctgaactatttactgcaccagcaattgcggatgacgagcgcgatctcaagccttcgccggatgttgctgaactggcctgcaccgccagcccatacccgggagattatcgaggcgctgctcgccgctcttgcgcgtccggatgccgatatctataccgtggcccgcattatcgcgccgctcgccccaacggatgaatatgactacaggcaccgtgccttctggcagcgtctgaactatttctgccgcctgtatctgcgcagcagccgctggttaaaagccgtcgagaatgccacgcccgtcaccgaattttccgttcccggtagtcctgctctggcgcgccataccgacgcaatggaggcgctgtggagcggttttcgtacgttttgtgcgttgacggccgtgggcgcatgggccatcaccacgcaatgggatgcgggcagtgcggccctgacgcttgcggcaatcagctgcgtgctctattccgtcgccgcttccccctttaattccctgacgcttctgctgcgtacgctggtactgctgtcgctattcagcttcgtggtgaaatttggtttgatggtgcagataaccgacctctggcaatttctgctgtttctcttcccgctattaaccaccatgcagttgctcaaactgcaaatgcctaaactggccggtctgtggggtcagttgattgtttttatgggctcatttatctctgtaacgaatccaccggtttacgattacgctgattttctcaacgacaacctggcgaagatcctcggcgtggggctggcgtggctggctttcgctgtgctacgcccgggctcggacgcgcgtaaaagccgcaggcatattcgggagttgcgcaggggttttgtcgatcagctgagccgcaggccgcatctgcgcgaaagcgagtatgaatccctggtttaccatcatgtcagccagctgaacaacagccaggattcactctcccgtcgctggctgctgcgctggggcgtggtgctgttaaactgttcgcacgtggtgtggcaactgcgcgcctgggagacgcgttccgatccgctgtcgcaggtccgtgataactgtatttccatgctccgagatgtgatgagcgagcgcggggtgcagcagcgccccctgagcgtcacgctcgccgagcttcagcgtatttgcgacgcgctggcgcaccatcatcagcctgcggcccgcgatctggcgtccattatctggcggctgcactgctccctgtcacagcttgaacaggcgccgccacccggaacgattggcgatcagatcaccccgcaggcatagcgcgccccgccgccgccaagcggtttaggctgatcggacatgttatcgccgcccacgtggaccatcagcgccttgcctttgacctcgtcaagctttttaagtcgtggcgccacaaccggatcggtggctttaccatcgttatttaccaccagcaccggcagatcgccgaggtgccccatcccttccgggccttcatgcttaccggagttgtgcgggtcgagatgcccccctgcggcttccgcagctgttggtttcccctctttcatcgcgggttgacagctgcctttggcatgaacgtgaaaaccatgttcgccgggtggaagagccttgagatcgggagcaaattccagccctttatcggtttcggtgattttcaccgtcccgatggactggcctaccccctgagaagtgacgagattcatttcaacgtcctcgctggctgcatgcgcacctgcgcaaacaaccagcgtgaccattgccagagcaaaacgcttcataagacctccacgggttattttttgcaccttaagtctataccagcggcgcagatttcaccggaaagtcaggttcaggcgtgctcagggtacgtcgtagcccagcgccgccttgcggatgcggaaccactgctgacgcgtcatatccagctcctcagccacaagcgcagcgcggacgcgctcaattttgccggagccaataattggcagcggtttagacggcaggcgcaggatccaggcgtaaaccacctgctcgatactctccgcattcagttcgcgcgccaccgtttcaagctcgttacgcagcggctggaatgcctcatcgttaaacaggcgaccgcctcccagacaggaccatgccattggacggatgcgcagctgttgcagttggtcgagcgtgccatccagcagcagcggctgatgaacaggcgagatctccacctgattcgtcgccagcgtaaacggcaggcgagactgcaatagcgcaaactgtgccggggtgaagttagacacgccaaaatggcgcactttgccgctctggtgaagcgtcaggaaggcttccgcgacctcatccgcatccatcaacggatcgggtcggtggatcagcagcaggtcgatacgatcggtggccaggttaatcagtgactgctcggcgcttttaacgatatgcgcgctgtcagtgatgtaatgcccaagcgcatgctccggttttgctgtggtggcaataccgcatttggtcacaatctccatacgttcacgcagcgccggcgcacgcttcagcgcttcgccaaaggcagcctcgcattgatagccgccataaatatcagcgtgatcgacggtggtgatcccgagatcgagatgctcttctataaagtccgccagctggaccggagacatattccagtccataaggcgccagtagcccataacaaatcgggagaattccgggccctgcggggcaagggtaatacgctgaaccataacattttcctcaaggaagtcatgtcaccagtatacgcaattaccctgctaaaacagtgaaggttgctgaggttcttcgctttcaaccgctttgtttgcacgaattttacgcagcagacgctgtcgacagagccgtaagacctcctgcttttgcgcgtcgctgaaattttgccagttaaaacgttcatcgcgcgtgcgcatgcagccacgacagtatcctcgttcatctacctggcaaataccccggcacgggctctggacagggaaaaactccagttgctctgccacacctacctccagaacgtcattattccctacagtgaagaccctaaatggcttgcatgcaaggatgtgcgccacaaacagagcattaaggtttcgctaatcttcccttcttatactcgccgcattgatataacgaatggtctggtcatcatgtggttcactaaaaagttacactgtaacgatataaaatttactctgggctgtgcacttttcttcaccgtactgaatgcattgtttatccagcgcagctggtcaatcattgcgcctgcacatctgcacgatctcctgtttgctgccagcgtgccgctggtgctgttctgcggctgggtgattgtcttcagcctgctgaatattccctttattcgcaagccgctcatgattgtcctgaccctgggatgcgccgccgcaacctggtttatgtatacctatggcacggttatcgatcagaacatgattgtgaacgtgttcgaaactaattcccaggaagcgactgccctggtgacgccgcagatgatcctgtggctggtcgttgcgggtctggttccatcgattattttagccctgacgcgcattcgcaccggaaaatggtggtatgccctcctgacgcgtgtcgccgctatgctgggtgcgctgctggtgatcatcctggtcgcggcggtgttttataaagactatgcttctctgttccgcaataacaaaagcatcgtcaaaatggttaccccggcgaattacgtgagcgccgtggtgaaatacagcaaaatgcgctggtttgccggcgaccagacgctggtccgcattggcgaggatgctcataaaggcgcgctgatttccagccaacgcaagaaaaccgtgctgattgtggtggtgggcgaagcctcccgcgccgcaaactactcgttaaatggttacccgcgtgaaaccaaccccgagctgaaaaagcaggatgtcatcaacttcccccaggcctcctcctgtggcacggaaaccgccgtttccgtcccctgcatgttctccggcatgacgcggaaaaaatatgacgcggacctcgcccatcaccaggaaggtctgctcgatgtacttaaccatgccggtttcaacctgctgtggcgcgacaacgacggcgggtgtaaaggcgcctgcgaccgcgtgccgcacacggacatgacccagtggaaactggatcagttctgtaaggacaaatcctgtatcgacgacgtcaacctctaccgtctggacaacgtactggatggaataaagcaggatacggttctggttattcatctgatgggcagccacggtccggcctactacaaccgttatccggacagctttcgcaagttcaccccaacctgcgataccaatgaaattcaggattgcgatcatcagtcgctgatcaatacctatgacaactcgattttgtataccgacagcgtggtcagccgaaccatcgacgcgctaaaagcccggcaggccaacatgaacacggcgctcatttacctctccgatcacggtgaatcgctgggtgaaagcggaatttacctgcacggtacgccgtatatgctggccccggagcagcaaacgcatattccgtttatgttctggctctccccggattatgcgaaaaacttcggcgtaaacacggtttgcctgcgtgaccatgccgcaaaagaggcggtttcacaggacaatttattcgccaccgttctgggcatgatggacgtgaaatcagcggtttatcaaccgcagctggatattctgtcgcaatgtcgtcgctaagcgtgcttgcattagaccgaacggtctattagagtaagggcatgagcagacacactgaacacgatacacgagaacatttgctggctaccggcgagcgcctttgcatgcatcgcgggtttaccggtatggggctgagcgagttgttaaaaaccgctgaagtacctaagggatcgttttatcactattttcgatccaaagaggcgttcggcgttgccatgctggagcggcactacgccagctaccatcagcgcctggcaacccacttcgccagcggtgaaggtgactaccgggatcgtgttctgaactactatcaggaaacgctgacgcagttctgtcagcagggcatcatcagcggctgcctgacggtaaaactgtctgccgaagtgtgcgatctctccgaagatatgcgcaccgcaatggataaaggggccagcggcgttattgccctgttggctcaggcgctggagagcgggcgcaatgaaaaaacgctctccttctccggcgatccgctcacgcaggcacaggtgctctattccctctggttaggcgccaacctgcaagcaaaaatgtctcgcagcgccgtgccgctcgaaagcgcgctggcgcatgtgaaaaactgtattaccgcgcctggcgtgtagccggcgtttttatttacccttttactagtcgactggtctactcaggagccgttatgtccgctgaaaagctgtttaccccactgaaagtgggtgccgttactgccccaaaccgcgtgtttatggccccacttacccgtctgcgcagcatcgagccgggcgatatcccaacgccattgatgggtgagtattaccgccagcgcgccagcgcgggcctgattatctccgaagccacgcagatttctgctcaggcaaaaggctacgccggtgcaccgggtctgcacagcccggaacagatcgccgcgtggaaaaaaatcaccgcaggcgtgcatgctgaagatggccgtattgcggttcagctgtggcacaccggtcgtatctcacacagcagcatccagcctggcggtcaggcgccggtttctgcctctgccctgaacgccaatacccgcacttccctgcgcgatgaaaacggtaatgcgatccgcgtcgacaccaccacgccacgcgcgctggagctggacgagatcccgggtatcgtgaatgatttccgtcaggccgtcgccaacgcccgggaagcgggcttcgacctggttgagcttcactctgcgcacggttacctgctgcatcagttcctgtccccgtcttccaaccagcgtaccgaccagtacggcggcagcgttgaaaaccgcgcgcgtctggtgcttgaagtggtggatgctgtctgtaatgagtggagcgcagaccgcattggtattcgtgtctccccgatcggtactttccagaacgtcgacaacggtccgaacgaagaagcagacgcgctgtatctgattgaagagctggcgaaacgcggtatcgcctatctgcacatgtccgagccggactgggcaggtggcaagccttacagtgaagccttccgtcagaaagtgcgcgagcgcttccacggcgtgattatcggggcgggtgcgtatacggcagagaaagccgaggatttgatcggtaaaggcctgatcgacgccgtggcctttggccgtgactacattgctaacccggatctggttgcccgtttgcagaagaaagccgaactgaacccgcagcgccctgaaagtttctatggcggcggcgcggaaggttataccgactacccttcactgtaatcccgctttgtacattgatagcggcgacctttcgccgctatactaaaacatcgtttctgttcaaaaagataatccattccactggttaatgaggaaattatgcgcctacttcacaccatgctgcgcgttggcgacctgcaacgttccatcgatttctacactaacgttctgggcatgaagctgctgcgcaccagcgaaaatccggaatataaatactccctggcgtttgtcggttacggcccggaatctgatgaagcggtcatcgagctgacctacaactggggcgtggacagctacgagctgggtacagcttacggccacatcgcgctggaagtggataacgccgccgaagcctgcgaacgtatccgcagcaatggcggtaacgtcacccgtgaagccggtccggttaaaggcggtaccaccgtaattgcgtttgtggaagatccggacggttataaaatcgaactgatcgaagccaaagacgctggtcgcggcctgggcaattgatcccgcagggcgcactttgcgcccgttgttttgctgcatcccctctcaaaatttgccataatgcgcactgctttttcccccttgtaagagaccctgatgtccgataacgctcaatttaccggtctgtgcgaccgttttcgtggtttttatcccgttgtcattgatgttgaaacagccggatttaacgctaaaaccgatgcgctgcttgagattgccgccatcacgctgaagatggatgaacagggctggcttgtaccggacaccacgctgcatttccacgttgaaccctttgaaggggcaaacttacagccagaggcgctggcctttaacggtatcgatccgacaaacccgctgcgcggggcggtaagcgaatacgaggcgctgcacgccattttcaaaatggtgcgcaaaggcatgaaagagaatgactgtagccgcgccattatggtggcccacaatgccacctttgatcacagcttcactatggctgccgccgagcgtgcctcgctcaagcgtaatccattccatccgtttgtgaccttcgacaccgccgcgctgagcggcctggcgctggggcaaaccgtgctctctaaagcctgcatcacggcgggtattgcgtttgacggcacccaggcgcattccgcgttatacgacaccgagcgtacggcggagctgttctgtgagatcgtcaaccgctggaaacgtctcggcggctggccgctgccgatgggcgacgaggccgatcttcaatcgtaggttgggtaatcaatagccccacaggacaaaaaaaagcgaccaacataatgtggtcgcttttttatatccgcagaaaacttactctgcgtccggctcttcggttttatacttcgccgcagtctctttgatcagctgttgcagttcgccgcgctgatacatttcaatcaggatgtcgcatccgccgaccagttcaccatcaacccacagctgtgggaaggtcggccagttggcgtattttggcagttcagcgcgaatgtccgggttttgcaggatatcaacgtaagcaaaacgctcaccacaggcggacagcgcctgaaccgcttgcgcggagaagccgcagcttggcagcttcggagaacctttcatgtacaggagaatcgggttttcagcgatctggcgctgaattttttcaatagtggagctcatgtcttgcttcctttaacttctgttacggcatcagtctgacattgtagcgggtcaggccgacatcggaaaataacatttttgtcacgtctaattattttatcgcttatcgcataaagttgcattgctaatgtcgtttatccccagacggggtgcggttttgcttaaggagcgaacaggagtgcgtcagaatggtgaatttttttgcacttgctaacgaaacataatttttgaatgaaaaatgctattaacttcttctgattttatggattagaatcgacaggttttgtaaatctcacgcgggtatgcattgtggcctgcatttatcaggggactgcccagtggcgcggataactaaaatctcgatgacgctctgtgctttactgtttaccacactctcatttacgccagcggcgaacgcctctgaacaggcgcggcattctgctgtacaaaaatcgcatctggcaaaaaccacagaacgtaagaaaaaaaccaccagtaaaacagtaaagaagaaaaccaccgctcagaccaaaaagaccgcctccagtaaacccaaaactctccgttccggcacgcacaaaaccacccgcacgaccgccagcctggtgaatgaaaaatgcaccgtgcgcaaaggccataaaacgaaatgcgcaaaagtgacgaagctggctgacgtgcataaagcgcgtatgcagaaagcgcaaaaaacggcgatgaacaaactgatggggcaaataggtaaaccgtatcgctggggtggcacctctccgcgcaccggttttgactgtagtgggctggtttattatgcctataaagatctggtgaagtttcgcattccacgcaccgccaatgagatgtaccatctgcgcgacgccgcgcctgtaaaccgtggcgaactgcaaaatggcgacctggtgttcttccgcacccagggacgcggtacggccgatcacgttggggtgtatgtgggtaacggtaaatttatccagtcaccgcgcagcggtcaggacattcagatcacctctctcagcgaagattattgggtgcgccactatgtgggtgcgcgccgcgtgatgacgccaaaaaccattcgctaaaccctgccgtgccgcctccatggcagggtaagttcctcttttgcataccctttcaatttgctattctgtccttgttgtctgtagggttattggcaacgtataaaactataaggagagaagcaatgtcgttcgaattacctgcactaccgtatgcaaaagacgccctggccccgcacatttccgcggaaaccctggagtaccattacggcaagcatcaccagacctatgtcacaaacctgaacaatctgatcaagggcaccgattttgaaggcaaaacgctggaagagatcgtgcgcagttcagacggcggcgtattcaacaacgccgcacaggtgtggaaccacaccttctactggcactgcctggnnnnnnnnnnnnnnnnnnnnnnnnnnnnnnnnnnnnnnnnnnnnnnnnnnnnnnnnnnnnnnnnnnnnnnnnnnnnnnnnnnnnnnnnnnnnnnnnnnnnnnnnnnnnnnnnnnnnnnnnnnnnnnnnnnnnnnnnnnnnnnnnnnnnnnnnnnnnnnnnnnnnnnnnnnnnnnnnnnnnnnnnnnnnnnnnnnnnnnnnnnnnnnnnnnnnnnnnnnnnnnnnnnnnnnnnnnnnnnnnnnnnnnnnnnnnnnnnnnnnnnnnnnnnnnnnnnnnnnnnnnnnnnnnnnnnnnnnnnnnnnnnnnnnnnnnnnnnnnnnnnnnnnnnnnnnnnnnnnnnnnnnnnnnnnnnnnnnnnnnnnnnnnnnnnnnnnnnnnnnnnnnnnnnnnnnnnnnnnnnnnnnnnnnnnngcgattaacgccgcgttcggcagtttcgcggattttaaaacgaagtttactgacgcagccgttaaaaactttggctccggctggacctggctggtaaaagaggctgatggcaaactggctatcgtttccacttctaatgcgggtacccctctggccaccagcgccacgccgctgatgaccgtggacgtatgggaacacgcctattacattgattaccgtaatgcgcgcccgaactacctggaacacttctgggcactggttaactgggaatttgttgcgaagaacttcgccgcgtaagagacacgcagaaggggcagcccttctgcgtttttgtttattccgccgtacacaccgcttcaggctgtttacgaccagacatcatcaccagcagcaggccgagtgcagcaatgatcgcccccatcaccggcacaaaactgtaacccaaaccaccggagatcaccgccccgcccgctgcggcccccagcgcattgcccaggttaaacgcaccgatattcaccgacgaagagagccccggcgcttcgtgcgcaacgcgcattacgcgcatctgcaacggtggcaccacggcaaaggttgcggcgccccacaccaccatggcaatcgcggcacccacttcgttacgcgccagccacggaatcgccaccatgatgacaatcagcagcgttaaaaaacctttcagtgttccactgacggagcggtcggcaaatttcccgccgagatagttgccaatcgagaacccgacaccaatcagcaccagcatcgcggtaacaaagagtggcgttgcgtgggtaatgtcgtgcagcaccggggagatataggtgtagagcgtaaacatcgccccggcccccagtaccgtggtaagcagcgcggacaacacctgaggacgcatcagcaccgccagctctttacgtacttccggacgttctcccgcacttcctttcggcagtgagaagaacagcgcaaccatcgcgaccacgcccagtccggcggttgcgaggaaagacatacgccagccgatggtttctcccagccaggtggcagcgggaacgccgccgatattagcgatggtgaggcccatgaacatagtggctaccgcgctggcctgcttatgttttggcaccacgctggcggcaacaaccgagcccagtccgaagaaggcgccatggttgaggctggtcagaatgcgcgaaagcatcagagtggtgtaatcgggcgaaatcgcggaaagcacatttccgagagtgaaaatcgccatcaggaaaatcagcgcattgcggcgagcgcggtgggaaagcagcagcgtcatcagcggcgcgcccaccatcacgccaatcgcgtaggcgctaattaacataccggccgcaggaattgagacgtccacaccccgggcgataacaggcaataaccccataggggagaattcagtggtgccaatcccaaaggcgccaatcgccagggccagcaggggaaaattgattttcatgaagagactccggataccgtgccataacccggcacagaactaagaagtcaaaagcatgacatcaatcacaaaaaatgagaagttaacattttggcaaaagatttttgccggagaggtaacaatagcggcaagagagggagaaggttctcccccctcctgaatcagtgcagcgcagcggttaaaccacccgcaacaatcagggcaagaacaacaatggtggtaaacagcgaaaacttcagatcggtactcatcaatttttctccttttattcaccctacgaaaagtgagcttgctcatttttacacagttcaggtcaaaaatcttccaggatttaagcggatatccactttacctcttccccttttcatcaagataggacaaaattccacgctaaatttattagcgtaccggccactgaccccctcctgacgtcctgtgtcgttttcccggcgtgtcgcaactcatgtttgcgtgataagggtgagagaaggcaaacgtttaccttcaattttttcaggagcttaggatatggtctggagtgacatttaatggcaacaattaaagacgtagcaaaacgcgcaaacgtttccaccacaaccgtatcacatgttattaacaaaacgcgtttcgtcgctgaagagacgcgtaatgccgtctgggcggcaatcaaagaactgcactactcgccaagtgccgtcgcccgcagcctgaaggttaatcacaccaaatcgattggcctgctggccaccagcagtgaagcggcctactttgctgaaatcatcgaagccgttgaaaaaaactgcttccagaaaggctataccctgattctgggcaacgcgtggaacaacattgaaaaacagcgcgcttacctgtcaatgatggcgcaaaagcgcgtcgacggcctgctggtaatgtgttctgaataccccgagtcggtcctttccatgctggaagagtatcgccacattccgatggtggtcatggactggggcgaagcgcgcgcagacttcaccgactccgttattgataacgcctttgaaggcggctacatggcggggcgttatctggtagaacgcggtcatcgtgaaattggcgtgatcccgggaccgctggagcgtaacaccggggctggccgtctggccggtttcatgaaagcgatggaagaggcgctgatcaccgtgccggaaaactggattgttcagggcgacttcgagccggagtcgggctatcgcgccatgcagcagatcgtctcccagccgcatcgccctaccgcggtgttctgcggcggcgacatcatggcgatgggcgcgctctgcgcggcggatgaactcggcctgcgcgtcccgcaggatatctcggtgatcggctatgacaacgtgcgcaacgcccgcttctttaccccggcgctgaccaccattcaccagccgaaagattcgctgggtgaaacggccttcaatatgctgctggacaggatcgtcaacaagcgtgaacagtcccagtccattgaagttcacccgcgcctgatagaacgccgttccgttgcggacggtccgttccgcgactaccgtcgttaatctcattacggggccagctatgctggttcccgcaaccactcccggttcagcgtttcgctgtcgcccagataatccagcagccaggccatggcgggcgagacgtcgttttgctgccacgtcagacagcacgcggcatccgggaaggggttttccagcgtcaaggccacccactctcccgcgtcgatgcgcgggcgcgcaaaatgtaccggcaccatgccaacgcacagccccgcgctcagacaggtggccgacgactcccagtccggtgcgaccacgcggcgctgattatccagcagccaggtaatgcgcttgggcagcgagcgggaggtatcttccagcaccagcgagggccagttgcgtaaggtgtcatcgctcagcggaccttccagcgccgccagcgggtgatcgcgcgcgaccacgcaggtccagctcagcatgcccatgtcgcgaaacgcgtagcgccccccaaccgggatcgcctgggttgcaccaatcgccatctccgccctgccgtccgccagcgcatcccagacgccgttgaacacttcctgcgaaacacgcagttcgacgtcggaaaaatgacgatagaaatcgacgatcatctgccgggtccgctccggcttaacgatgttatccaccgcgatagcgagatgcccgcgccagccgttggcgatctgctggcactgctcacgggtgatctgcatttttttgataacagaccgcccttccttcaaaaaccacgctccggcaggcgtgagctccacgtcgcgatggcgccgctcgaacagcgggaccgccagccacgcttctaactggcgcaccgtatagctgatagccgagggaacgcgatgcagctcctgggcggcaccggtaaagctgccgttacgcgccacggcatcaaccacttcaagggaataatctgaccacatctttagcctgcaaattttttgaacgcacccgccaaatattagcgtttcacaagccgctttgcactccctacactctgcgccaacgtacacctgccccctcaggaagaaaaagtgcaacccaggaaaggatttttagtctggctcggcggcttaagcgtgctgggctttttggcaaccgatatgtatctgcccgcgttcgccgcgatgcaggaagatttgcaaacccctgccgccgccatcagcgccagtttaagtttgttcctcgctggctttgcttttgcgcaattgctgtgggggccgctctcggatcgttttggccgtaagcccgtcctgttgttggggctggcgatttttgccgtaggctgtctgggcatgctgtgggtccgcgatgccgcctggctgctggcgctgcgctttattcaggcggtcggcgtctgcgccgcagcggtgacctggcaggcgctggtgaccgattactaccccgcctcgcgcactaaccgcatattcgccactattatgccgctggtcggcctgtcgccggcgcttgccccgttactgggcagctggatcctcgcgcatttcgactggcaggctattttcgccacgctctttgctattacgctggtcctgatgctgcctgctttcgggcttaaacctgcgcataaaaaagagacgcatccggacgcaaagcccatcacctttacctctttactgcggtcgaaagcctatcgcggtaacgtgctgatttatgctgcctgctctgccagcttctttgcctggctgaccggttcgccgttcattctgcatgacatgggctacagcccggcggctatcggcctgagctatgtaccacagaccatcgccttcctggtgggtggctatggctgtcgcgccgcgctgcaaaaatgggaaggccaacagatgctgccctggctgctggtgctgtatgcactaagcgtgattgcgacctgggctgtcggctttatacccggcgccgggcttgcagaaattttgattccgttctgcgtcatggcgatcgctaacggggctatctaccctatcgttgtagcccaggcgttgcgtccattcccgcaggcgacaggccgcgctgccgcgctgcaaaataccctgcaacttggcctgtgcttcctggcaagtctcgtggtctcggcgttgattgcaaccccgctgctcaccaccaccagcgtgatgctggtcaccgttgcgctggcgggattgggctatcgcatgcagtcctcagcccatcgcgagcagagtgaaaacgcgcagacagaaacgtcgcacgcctgattgcgtgggaaactatgttaaaaaccagtgattaggttgctaacaattttctgttgaatcaccaaattttgcggcctatactgaatttggttcgattaaatacgataaatattaagtgttaacgggagccggagcgctcccgttttaccatggaaggcatttcggcaagggttatctcccttcctctgttctacgtcggatattagcctcgcgggcatttaccgtgagatttctcacaaaccaaaaaagcgtctacgctgttttaaggttctgatcacagcaaggtgatggagaagctatgagttcatcgtgtatagaagaagtcagcgttccggacgataactggtcccggatcgtcagtgaactgttgggacgtgcgggcattacgattaatggctcatccccctccgatccccagattaagcatcccgattttttcaaacgcgtcttacaggagggatcgttagggctgggtgaaagctatatggacggctggtgggagtgtgagcggctggatatgttcttctccagcgtattacgcgccggtctagaaaaacagctccctcgtcatttcaaagatactttacgtatcgcctccgcccgcctgttcaatctgcaaagtaaaaaacgggcgtggatcgtcggtaaagagcattacgacctgggcaacgatctgttcagccgtatgctcgatcctttaatgcagtactcctgcggatactggaaaaaagcgacgaccctggaagaggcgcagcaggacaagctgcaactgatctgcgataaattgcagttacagcccggtatgcgtgtgctggacatcggctgtggctggggtggtcttgcctggtttatggcgaaaaattacggcgtcagcgtagtcggcgtcacgatttccgctgaacagcagaagatggcgcaggaacgctgtctgggtctggatgttgatattcggcttcaggactaccgcgacctgaacgagcagttcgatcgcattgtttccgtaggtatgttcgagcacgtggggccgaagaactacaagacctacttcgaggtcgccgatcgtaacctgaagcctgagggaattttcctgctacacaccatcggctctaaacgcaccgataacaatgtggatccctggatcaacaaatatatcttcccgaatggctgtttaccctctgttcgccagattgcgaacgccagcgaaccgcattttattgtggaagactggcataacttcggcgcagattacgacaccaccctgatggcctggcatgaacgtttccaggctgcatggcctaaaatcgccgacaactattcggaacgattcaaacggatgtttagctattatctgaatgcctgtgcgggcgcgttccgtgcgcgggatatacagctttggcaggtggtgtttagtcgtgggattgagcacggtttgcgtgtggctcgctgaaaaaataaccccggttaaccggggttattttttattcttcttccatggttttaattatcgccgcctctttcgccgccagtacgcgctcaacggtatccacgaccgcctgggtctggggatcaatttcgatatttacgcgctgccccagtttttttgcgccaagcgtagtacgttgcagcgtttcaggaattaaatgcacgcaaaaacgcgttggcgtcacttcaccgacggtcagactaatcccatcgatgccaataaatcctttataaaggatgtatttcattaatgacggatcctgcaccttaaaccagatttgacggttattttccgaggtcacgattttcgccacttctgcggtggtcataatatggcccgacatcagatgcccgccaatctcatcgctgaatttcgccgcgcgttccacgttgacgatatctcccaccaccagctcacccaggttagtgatacgcagcgtctctttcattaaatcaaagctaatctggttaccgttaatttcggtcaccgtcaggcagcagccgttatgcgctatcgacgccccggtttcaatgccgtcgagcatatattcaggcagctcaactacgtgagtgcggaaattcggtttttcatcaatggacaccactttggcagtgccctgcacaataccagtaaacatgcttacagctcctgttcattccgaacggcgatgacaccgtataatcccaccacaataacagttgaaaaaacaggttgccagtgatgcgcaatttctggcgattttttcactagataattagttaaaccccgctacaatagctggcatccctctgttttttcttcttgctgccagtaacggcggcctttttagtctctcaaataactacaatacaaaggtgttcacgtgcagaagtatatgatcgaagcgcgtcagttattggcactggccataccggtgatcgtcgcgcaggtagcccaaaccgcaatgggatttgtggatacggtaatggccggtggttacagcgccaccgatatggccgccgtggcgatcggaacctcaatctggcttccggccattctttttggtcacggcctgctgctggcgctgacgcccgttatcgcgcagcttaacggctccggtcgacgcgaccgcgtggcccatcaggtgcgccagggcttctggctgggccgggggtgtctccgtcctgattatgatcgtcctgtggaacgccgggtatattattcgcgccatgcataatatcgacccggcgctggcggataaggcggtcggttatctgcgcgccctgctctggggcgcgcccggctatctgttcttccaggtggcacgtaaccagtgtgaagggctggcaaaaaccaagccgggcatggtgatgggctttatcggcttgctggtgaacattcccgtgaactatatcttcatttacggtcattttggcatgccggaactcggcggcgtgggctgcggcgtggcaacggctgcggtgtactgggtgatgttcggctgtatgctcacctacattaaacatgcgcgatccatgcgtgacattcgtaacgacacctcgttcagcgcacctgactggacgctcatgacccgtctcattcagctggggttacccattgcgctggcgctgttcttcgaagtgacgctgtttgccgtcgtcgccctgctggtctcgccgttagggattattgatgtcgcaggacaccagatcgccctgaacttcagctctttgatgttcgtcctgccgatgtccctggctgctgcggtgacgattcgcgtgggcttccgtctggggcaaggctcgacgctggacgcgcaaacggcagcccgcaccggcctcggcgtcggcgtctgcatggcagtctgtaccgcgctctttaccgtgctgttgcgtgagcaaattgccctgctctataacgacaacccggaggtagtgaccctggcctcgcatctgatgctgctggcggccatttatcagatctctgactccatccaggtgattggcagcggcgtgctgcgtgggtataaagatacgcgttccatcttcttcatcacctttatcgcttactgggtgctgggtctgccgtgcgggtacattctggcgctcacggatctggtggtggatcgcatggggccagccggattctggatgggctttatcatcggcttaacgtctgcggccattatgatgatgctgcgtatgcgcttcctgcaacgtcagccgtctgcggtaattttgcagcgcgctgcacgttaatgacacagtagccgccggctggcggctactttctcttcactttgcgcggtaatgaagcaatcgcgtgaaatcagagagaaaaatgcattttccctcttgccaccttggggctgtgccgctaatattcgtccccgttgtcaccgacaacacaatgcgttcatagctcagttggttagagcaccaccttgacatggtgggggtcgttggttcgagtccaattgaacgcaccattctgcgtctgtagctcagttggttagagcaccaccttgacatggtgggggtcgatggttcgagtccattcagacgcaccaatcttttttcccgcacatttcattcccgttcagcctcatgcagaggcagcaaaccttttaagcacatcgaaagtgacctccagcccgcgcgtgccgcgaaagagcggaatggcataagccccatcaggttagcaaaacgcccggcgtttgccgggcgtgaaaacaacgtcaatcaatgattacggcttatgttcaatcgccgggttgttgttgatggcgatgcgctgcggtttctcttcttccgggatatcctgatgtaattcaatcgccagcaagccgttttccagcgaagcgccggttactttcacatgctccggcagactatagctggcccggaagtcgctgcggctgataccccgatggatccacccttcttcgccgttttcggttttctcttcttcacgtttaccgctgatattcagctgaccgccaacggtttcaatttccagttcgnnnnnnnnnnnnnnnnnnnnnnnnnnnnnnnnnnnnnnnnnnnnnnnnnnnnnnnnnnnnnnnnnnnnnnnnnnnnnnnnnnnnnnnnnnnnnnnnnnnnnnnnnnnnnnnnnnnnnnnnnnnnnnnnnnnnnnnnnnnnnnnnnnnnnnnnnnnnnnnnnnnnnnnnnnnnnnnnnnnnnnnnnnnnnnnnnnnnnnnnnnnnnnnnnnnnnnnnnnnnnnnnnnnnnnnnnnnnnnnnnnnnnnnnnnnnnnnnnnnnnnnnnnnnnnnnnnnnnnnnnnnnnnnnnnnnnnnnnnnnnnnnnnnnnnnnnnnnnnnnnnnnnnnnnnggatattgtaagaaggcgtggagggcaacggcgtactgccggttagctggctaaaaaggcgatcgatacggttaaaacggtccgcaaacagagagtcggagagatcgttcaacatgggaaaagctctcagagtcatcatgtacctcctgaacagtaaaaaagaatattcaaaaagttcatgtcttacgggcaggtattccttacccgctttctatatgaggttaccgcacaatatttcaacctcaggagctgcaaaatgtagctggaacctaaaaaacgcaacgggccgttaagcccgttattcgttacatcatcgcagttctatcactctcgcccgctcagcctgctttcggtagtggtcatatcgctcccggaaccatgcctgctgttcataactcatattgccggtcacggcatcgacatcaactggctggcccagggcgtacatacgggcaaaactgcgtgccagaaaatcaaaattctttaatgcgttaatatcttgtcgcttcattagcatatccctccagtcaatgtgattactgttcaaggtcatatgcttttctgatctcagtatccgcccgaaaaagatcgttttttgagcgatgcgtgcgcatccatctgccagtgttcacatttcaggaacgacaaaactcttcagccctggtcataattttccctcccttttatcaatcatgcagaaaacataaacgccagccatgcagtaagttcgccatgtagccggaaggtgcgaacggcatgctttaatgccagacgctgtaacaggtcgcccagcgcgttcaggtgggtttccacctgcaagcgtcttatcagttcgaataacagacaaagaacgtttacactggcggattaatactgatttcctgaacaaacgggtaaatgggtgaatccgggcttgttggccatatagagaagggcgcatgtaggttgccgcggttgtgtatcgaactgcgcattgttttctacaacacgctgctcctggcctttcacggctgttttctttttcgtctgcgcttgcctggcggagggggagggttttacctgccggggcagttcggaggcaccataacctgaacagaatcgcttcgaatggctcagacttccgtcattgcagacaaaacgaccatccgatgtacagtgtgctatgccatcttttgagcccgagcagggctgtcttccacgggcggcatcagcctgcatgttaaaaagtacactgaccgtaagatggagaattctcctgataaaatcagctggttctcctcactgacgctgtgcaggtcaagcccgccggcgaagttaccgtactttttaacccccatcacatacagataatcgttaaacctgggaccaaacagtctttcctttcagaaatcaggcagaatcatatctaatcagccagggtcaattgaattgaccttcccataagttcaggaaggggcgcaacatcccctcttcaaaacgtcttaatttttttccttcattgaatgatttaacctttctcctgctacgcttattttatggttcagaaatgcaggaacgctttcgatgaaaaaaatcgccattatcggctcaggtccaacagggatttataccttttactcacttcttaacaacgcagcaccgctttcgatcaccgtgttcgaaaaggcagaccaacccggtgtcgggatgccctacagcgacgaggataattcccggctgatgctggcgaacatcgccagtatcgaaatcccgcccatttttattacctatctcgactggctcaaacagcagagtgcggcccatcttacccgctatcacgtcgacagtgagaaactgcacgaccggcaattcctgccgcgtattctgttgggtgaatattttcacgatcggtttcttgccgtcgttgctgaggcgaaaaagtcgggctttcatgtcgaggtgcaccccaacgcagaagtcacggatattaaggctgatgcagacggtgtggccctttcagtgaacgatgcccctttctcaaggcggtttgatcttgcggttgttgccaccggccacgtctggcctgatgaagatgaaaccacccgcgcatatttcccaagcccatggtcagggctgatggacgcggaggtccgagcctgtgaggtggggatcatgggtacctccctcagcgggctggatgctgcaatggcggttgtgatgcagcatggccggtttagcggggagcagttcgttgtcaataaaggcagcgaagggttaaatatcacgctgatgtcccgcacgggcgttctgccggaggccgacttctactgccctatcccttatgaaccgctgtccgtgttaacggagtctgtggcggaaagcgaaatcgccaaaggcccggacgggctgcttgaccgcatctttgcgctgatggtgaaagagctcgagctggccgatccgcgctggtgccaggcgatatcgctcggtacgctgaatgccgacacgcttcgtgatgtctggtttgaggatcgtaaaaagcatggccctttcacctgggccgaagcgaatctgaaagaagtggagcgcaacaagcgcgaaaaacgcaccgttgcctggcgctataccgtgcttcgtctgcatgaagtggttcaggccatcgtcccttcactcagtgagcatgacagagagcggtttaaatccgggctggagcgtgtgtttattgataattatgccgccattccaccgcagtctatccgccggttactggcgctgcgcgaggcagggatcattagcgtggtcgcactcggtgataattacgacctggatatcggcagcgatcagaccgtcatcaccacggcagaaaagcgttaccgcttcgacgtgtttattgatgcgcgcgggcaaaagccactcagaaacaaggacattcccttccccaccctgcgtaaacagcttgcggaaaccggcgatgacgtcccggacgtgggggaagactatacgttgctggcgcctgcatcactgcgggggcgcatcgcttttggggcgatcccctggctgatgcacgatcatccctttgttcagggtttgtctgagtgcgctgaaattggtaaagcgatggcgaaagcggctggaaaacctgcgtcgggcgtgcgaaggaagttaccattcatggaattttaacagagcttccctgccctgcggggtcgggttactcgaagaagacgtccgggttttccgacagcgacacgaacgatttagtgttcttgtccagggcaaggattttgccgctttcgatgtcatatacccagccgtgcaggcgaatggcgttgttgcgcaggcctaccgccaccgacggatgggtcttgatattgctcagctgcgcaaagacgttctcctggaccatcgcattcaccttatcgattggcttatcccatgttttcttctcaaccaccgcttttgccgcatcagaatagcgcagccagtgggaaacggccggcatcggctccagatcggcgttgtcagcaatcgccttcattgcgccgcagttggagtggccgcaaataacgatatcggtcacgcccagggcaacaacagcatattcgatggtcgcagagacaccgccaggctccggcccgaacggaggcacaatgttgcccgcgtttcgaatgacaaagagctgtcctggctcctgttgcgtaaccagttccggaaccagacggctgtcggagcaggagatgaacagcgctttgggattctgactggacgctaaactacgaaaaagctctttacgttgcgggaaaatctctttttgaaagctgagaaaaccttcaatgatatgttgcatagccatttctcttttatctgttttagtttaggtatgatcgcgatcacactcgtaaaatttaaccaccgcgccttagccgagacaagcaatatatttctggcccgaccgctgcacgatctcatccgcgttcgccgggatgttctgcccttcaaaggccccgtacaggcgctggtacgttttccctgtcagtcgaccaatcaccgactcaacggtgcgggcaggcagcggcagcatattcggataactccacataaacgacacggcgtccttaccgggcgtaacctgcaaaatatcaccggccagcagcacgccgtcgcctgactgccagtgcagcaccgtgccgccggcaaaatgcccgcccagccgcagcagagtcaccaaaggcataatctccaggggcgtcctcctcccagaagcgtatcgccgggctgtcacgcatcacccactgccgatcgctggcgtgcaggtagatcggtgcgttaaacgccgcggcccactcctgcatggtggtgtagtaatgcgggtgcgaaatcgcgatcgcgctgatccccccaagcgcgtcaactaacgctctggtcgccgggtcaagattggcgatgcagtcccacagaacattgccctgtggcgtacgcagcagaagcgcccgctggttgatggcaaaagcgggaacggttttgatgctgaacagctgcggctccagctgttgccatttgttggtgtgcgtggtcgtaaggctgtcgaagtccgtccatgcctggcccgtcaccgggacatactggcgctcatcgtcgcaaatcgggcagtttttgggctgttcatcgtaagcggtaccgcaggttttacagagtgtaatcatcggctttcctcagcaataaagcactgagtatggcagggattatccatatgtgctgaggggtgcctggcccgctttttttgacttatactgtgcgagtatcaaaaactgaataacgcaggtggcacatggaaattgatctcgataacttagtctttaacgggctggatgaagcagaagagcgcaacgcggaacgtctcgacgatgcggataaaaaagcccaggcgattgtcgccgatgacgactgcggcgatgcctgcaagatctgaagaaaaagcaccgggctccccggtgctttttttttatgaatgccttttgctacccgctatcagatctccggcgttttgctaaacccggtcagcatcaggatcaggctttgggtagatgaccccgtctcaaactgatagtgatttccctgacgatcgccgccgatataccacgaaatgtcggttttcccttctgccagcgccttgcgcaccgctttatccacgtccaccatccggtattcgcgggagtggttcaggtacagcaccgcatccgagcgatagttgcaggacggtcgtgactgccagctcacggtggccggttcccagtcgttactcgccggatagaagaagatttgatccgcgccgtcagtttccactttcccgccataaattctcacgcggtatttaaactgggcaggatcctgtccgacaggcagcggagggatgttgaacttcaccagcgacaatgtttcgctgtttttcgtgcgtccaccgttcttccagttatcctgcaccagtaagacctggggatcgggctgtgaaagtgccggttccatgctgctgagccagacgttagccttcgcttttgaataaccatacggcacggcggtgccgcaatccattccccggttcatgcacaggtcggtcataaatcgcgcggcatcttccgtccagccgttcatgaagtcagcatgcgccgtatacaggctcccccaccgctcttcacgctcactgccatgcatgatggggtcgagggaaagctggactttgctgatatccagagagctaattgtcggaagcacgtacgcaatattcatgttcaccgtcgggatcttcaccgggaaggcggacggacactgtcctttcgtatcgtaggtggcgttagccaggccgtgggcgggcttcaggttgaccccgtcccagcagttcgggaactgaatgccgatattaaactgcacggcatccttcgccttgcgtaagccgcagacttcacccgttctggtggtgtagcccttgccattggcgcataaaaaggtgatatgcgtatttggcgcggtgccatgatgatcgcccgccagcagcgacagccccggcggaaacgaatgaagcggccaggcgtcaacgttcgatgcctgataataggttttttgataggcgggtttgaccaccgttccgtccggcaattttagcgacggagcccagtaggccgagctgtctgctttgttatcgcaggtggtcttttcctgggtacgcagagattcacggctggagtaagcatccgcgtgcacgttaccaaaaaaatcgtgcagcatagcctcattgggcatgccgaacatcataatggcatcatcgccgagggtgtgggaataactgcatacaacatgcgcctgtggaccagcgtgtaccgcctgcatggtaagcagaagtgcagaggcagaaagcgcgggggttaatactgtccgtttcattattatctccatctgtgaaaggagatagtggtaacaaaacggccatcatttaccgaggatttgcctgggtatttttcccttcatcctcgctttacagacaccacgcacagctcattccagtacatttcgcgcgtccggcgcagttcagcgtgacgttttatcatggaaccactccgggtcgatgttggctacgtccacgccatacaggctggcgacaggtagtattgactcaagaacacgttgcgcgctgttctccgcattcattggtcggggcgcaaataaccgccgtaacgtgcttatccattttttcatcgtcattacccttctcgcttaacctgtcctcagttaaacacccaaattgcgcccgggggaaatatcaaaatccactgtcgatgtgcaggatctgcaaatagcgccccgccgtctgctctcttctttaacaccttgttcactcatgctttttttctcatagcaaagaacgatttcttatttggcgatagctttcccttatgggagcgtaacggggtaaaacaaaaacaacgggatggcgtatgactatggctgcaaaaatgaaagggtttaaaaaacgggcgcaggttctgggattagtggcagcctggggcctggtttcagcgcaggcgcaggccgatcggctggcggatatcaaggcagcaggcgtggtgaaagtggccacgtttgatgccaatccaccctttggctcgattgatgccaaaacgcatgagatagtgggttacgacgtggacttcgccaaagcgctggcgaaatcgcttggcgtaaagcttgaactggtcgccaccaatccggctaaccgtataccgctgctacagtccggaaaagcggatctcatcgtggcggatatcaccatcactccggaacgcgcacaggtcattgatttctcgacgccttactttgtcaccggccagcagttcctggttccggcaaaatcaccggacaagcttgatgactatagccgggcacgcattggcgccgtaaaaggtacgacgggtgaacaggcgctgcaccagcgttttccgcagtcccgcgtcctctcttatgatgatattccgctggcgctgacggcactgcgcaatggcaacgtgcaggccattacccaggacagcaccattctggccggtctgctggcgcaggcgccggataaagccgacttcaaaatcctgcccgacctgctcagtaaagaagagattggcgtgggggtgaaaaagggtgaaacggcgctgctgagagccgttaacgatgagctggtaaccctggagaaaaacggccaggcggcaaaaatctatgacgtctggttcggtccagacaccccagctccacagcctcgtaactttaaaatagaagcccggtaatatgctctcaggtttattttcacgctccgcggccaatgccgcggatttttcacgtctggaacaggccagcgttgagtttcgccatgtggacaaacgctacggcgaccatccggttttaaccgacattaacctcaccatcatgccgggtgaagtggttgccattctcggcccttcgggttccggaaaatcgaccctgattcggcttatcaaccagcttgagagcctgagcggcggggagattctgatcgaccacaagccgaccggacagctttccggcagcaggctacgtcagttacgcagccgcgtcgggtttgtgttccagcagttcaatctctatgcccaccttaccgccagtcagaacatcaccctggcactggagcacgttcacggctggaaacccctgcccgcccaggagcgcgcgctggcgctgctggagaaggtcggcatgctggagaaggcgcaccgcttccccgctgaactttccggcggacagcagcagcgcgtggcgattgcccgtgctctggcctcgtcgccgcaaatcattctctttgacgagccgacgtcggcactcgacccggaaatgattggcgaagtgctgtttgtgatgaaaaccctcgcccacagcgggatcaccatgattgtcgttacccatgagatgcagttcgcccgggaaattgccgatcgaatcgtctttatcgacggcggaaaaattctggaaaccgcgcccccggcgcaatttttcaatcaaccgtcgcatccccgtgcgaggcgtttcctgcaaaaagtgctggatccgctgcatcaggagcaactgtaatgcccgctctggactggcagggggtgctggccggacagcccctgcactggatcctctccggatttctcaccactctgtgggtgacgctggcggggattatgctggccagcctgctcgccttgttctttatgcttttgcggctttccgggggacgtttcgggacattgatcgtcagcggctgggtatcgctgtttcgcaatacgccgctgctggtacagctgctgttctggtatttcgccgcctggaacgggttgccgcaggggctgcgtgacgcggtgaacgcagaccacagttggtccattttacccggtgacgtctggtggtttacgccagagtttttatgctccgcctgggggttaggcgtctttacctcggcgtttttaattgaagaagtggaatcggggctgcgttccgtacctgccgggcaacgggaggcggcgctcgctcagggattttcctcatggcgtctgtttcgctacattcttctgcctcaggggctcgctaacgcgtggcagccggtcgtcggccagtaccttaacctgatgaagctctcctcgctcgcgagcgggattggcttcgccgaactgacctaccaggtccgccagatagaaagttacaacgcccatgcactggaagccttcaccgtcggtacggtgctctacttgcttaccgggatggtgacgggaagcgtgctggtgcgcctcggcccccattcagggaggaaatatcatgatccccggatttaacgttattgtcgaaaacctggattatctgctttggggacgtgcggctgcgggagaacccggcggcgtactgctctcactgctgatggccgcaggcgccgccgcgcttgccctgcccggcgggattgtgctggcttgcgtcgcctggcgctatcccggcgtggtgcgcagtgcgctgtttgcgtgggcagagttgattcgcgggatccccctgatcttcgtgatattctggatgtggtatctgctgccactgataaccggcagggatctcccgggcgcgacgaccgtcacgctggcgctggcctggtttaccgcggctgcggtgatgcattcggtgttagccggactgagagccctgccgtcgggccagaatgaggccgcgctttctcaagggttcagtacgcagcaaacgctgtggcgcgtgctgctgccgcaggcgctgagaaatattctgccgtcgctggtggggatttttatcagcctgctgaaggatacgtcgctggcgtttatcgtgaacgttcctgaactgaccacggtggcgggacagatcaacaaccgggtgcaaatttacccggcggccatttttatcttcacgggtgtgatctattacctgctctgctgctcgcttgagctgctcgcgaagcgctggcgagttagccggccagcgctttaaccaccgtttccatcgctttggtggtcaactcactgcgcttaacgcgctggttcgccagcgcggtacgcagaacgcccgcaatgacaatatgtttcggctcctgccctaaatcacgcatttcgagaacgaccttgcctaccacccgacacatctcctggtaaagcgcttcgtctttggtcacattgcccattgccatcactccgttgccctaaaccgtcagcttaaatcattcgtcggctggatacaaaaaagaagcccggcgtgtagttcgccgggcttcgtctggaaaatcaggagattagttgtttaccgggatgactgcgcctttgtatttggtgcggatccagtcctgaatctctttggagtgcagcacgttcaccagcgcgacgatatccttcttcttctcgtcaccgcgatgaacggtaatgatgttggcgtacgggttattctcaccgctttcaaccgcaattggatcgtgcaccggatccagaccggcatcaattgcgtagttggcgttgatcaccaccgcagcaccttcgtcgttgttgtacatctgcggcagcagagatgcctcaacgttaggggtgaattgcagctttttcgggttctccacgatatcgctgatgcgcgcggtcactttatcgatgccaggcttcagcttgatcacgccctctttttcgaagatggagagaatacgcccttcctcggaaaccgcatcacgcatgatgattttgccgccttccggcagatccttcagcgatttgtattttttcgaatagataccgatcggctcaatgtggattgcgcccgcactgacaaagtcataatccttatcgcccgcgtgatctttcaggacgctgttcaggtaagggatgtgctggaaatagttggcgtcaatgtcatgccccgccagcgccgtgtttggcagaatgtagtcctggaatggtttaatctccagatcgatcccctgcttcgccagaatcggcttagcctgctccagaatttccgcgtgcggggtgttggacgcccccacggtgagcgtgtccgcccaggaggcaaagctcagggcactcagggttgcggcggcgatcagtgtcagtgtctttttcatgatgtggttcctgtgtgtatttattagcgtttatctaacagtgaagtaatggcatcgccgcagaactggataatgaacacgatgatcagaatggtcaccgttgccaccagcgtgacgtcaccatggttgcgctggaatccttccagataagccagatttcccaaaccgccggcacctatcacccctgccattgcgctgtagctcaccagcgcaatcagcgtcaccgtcatacctgaaaccagtgcgggtgaagattccggcaataaaacccgaaacactaacgtgctcagccgcgcgcccatcgaacgcgtggcctcaatgactcctttgtctacttctcgcaaggcaatctcgaccagacgggcgtagaacggcgccgcgcccacaatcagggcgggcagcgcagcgttagcgccgagaatggtccccacaacggtcttggtgaacgggatcagcagaacgatgagaatgatgaacggaatcgagcggaacacgttcaccacaannnnnnnnnnnnnnnnnnnnnnnnnnnnnnnnnnnnnnnnnnnnnnnnnnnnnnnnnnnnnnnnnnnnnnnnnnnnnnnnnnnnnnnnnnnnnnnnnnnnnnnnnnnnnnnnnnnnnnnnnnnnnnnnnnnnnnnnnnnnnnnnnnnnnnnnnnnnnnnnnnnnnnnnnnnnnnnnnnnnnnnnnnnnnnnnnnnnnnnnnnnnnnnnnnnnnnnnnnnnnnnnnnnnnnnnnnnnnnnnnnnnnnnnnnnnnnnnnnnnnnnnnnnnnnnnnnnnnnnnnnnnnnnnnnnnnnnnnnnnnnnnnnnnnnnnnnnnnnnnnnnnnnnnnnnnnnnnnnnnnnnnnnnnnnnnnnnnnnnnnnnnnnnnnnnnnnnnnnnnnnnnnnnnnnnnnnnnnnnnnnnnnnnnnnnnnnnnnnnnnnnnnnnnnnnnnnnnnnnnnnnnnnnnnnnnnnnnnnnnnnnnnnnnnnnnnnaccgtgcggttgtggaataacccgccgcgggcggttaaaaacagcgccagaccgagcgcgatccccaggacaaacgtcgccacgccggaaagcgcggtcatgtaaagcgtctcctgagttgcagcccaaagctgatcccacttcaggtgcggaaagagttcttcagccatgcttgattacctcgccttcaatatcgctttgcttcaggtcggcgaggatattgttcagttgttcgtccgatgccaccacgtgcacccagagctgcccgaaaacaccgtgggcggtttgcgtcattttgccgtgcaggatgttaaacggcaggccgtagcgcagggtcagttcaccgacgatcggcctgtgcgtgctgtgcccggtgaaggtcagcctgatcaccgtgccttccagatcgtttgccagttcggtattgaaggtctcttcctccgcgtactggctcacctggcggacaaactgccgggtgatcggctgctgcggatgcgtaaacacgctcagcacgtccccctcttccaccaccttgccgttttccatcaccgccacgcggtcgcagattttgcgcaccacgtgcatctcatgcgtaatgagtacgatggtcaggttaaagcgacggttaatgtccaggagcagatcgaggatctgatcggtggtctgcggatccagcgccgaggtggcttcgtcacacagcagtacgtccggatgattggccagcgcgcgggcaatgcccacacgttgtttttgcccgccgctcagctgggatgggtaggcattctcgcgccccttcaggccgaccagctccaccagctcggcaacgcgagcctgaatttgcgcttttggcacaccggcaatttgcattgaaaaggcgatgttttccttcaccgtgcgcgaccagagcagattaaagtgctggaacaccatgctgattttcaggcgtgcctgacgcagcgcttctcccttcgcggcggagatatcctgaccgttaatgttgacgctgccggcgctgggcttttccagaccgttcagcagacggatcagcgtacttttcccggccccgctgtaaccgatgatcccgtaaatctgtccctgctctattgtcaggttgacgttatctacggctgtcagcgcctgtttcccgttgtcaaaaaccttcgaaatattgctgagtacaatcattcttattcgttatccgtttcgcatatagcggtttagcagtatggatgtccaaaagatagtaaacagccgttatcagcttttaaatgaccaaaaaagaatttcttataatgctcaggaataagcagcgaactggcgggtgaaaagcatttagatgaatatcagcaataattatctgccatttgcatatcaggtcttactcacccgacgaaatcggctaattttgcagcactttatgcggatatagccatcctcacatccggacaactttacgtcttgctgtctttccatctgaaaacacaaggattattcctttccgttctaaaactcagtgaaaggttctttattgagaaaatttcatggttctatcatccggtcatcacctcttcacaggacatgaccatgacgctttaccactccgtcaccgaactgattggccgtacgccgctcatccagctgcacaagctggacaccggcccctgctcgctgtttctgaagctggaaaaccagaatcccggcggctcgattaaagaccgcgtcgcgttgtcgatgattaatgaagccgagcgtacgggccagctacggcccggcggcaccattattgaagccacggcggggaacaccggcctggggctggcgttgattgcggcgcagaagggctactcgctgatcctggtggtgccggacaaaatgagccgcgagaagattttccacctgcgcgcgttaggggcgcaggtcgtgctgacccgttcagatgtgaataaagggcatccggcctactaccaggattatgcccggcggctggcgaacgaactgccaggcgcgttttatattgatcagttcaataacgcggccaatccgctggcgcaccgcaccactaccgcaccggaactgtttgaacagcttgacggccagatcgatgccatcgtcgtcggcgtggggtccggcggtacgctgggcggcttacaggcgtggtttgcagaacattcgccgcagacggaatttgtgcttgccgatccggccgggtcggtgctggcggaccaggttgagaccggacgccatcacgatgccggatcgtggctggttgaggggattggcgaagactttatccctccgctggcgcacatcgaaggggttaaccgcgcctggcgcattaccgatggcgaggcgttcaccaccgcccgcgatctgctaaaaacggaagggatcctggcgggctcttccaccggcacgctgctggcggcggcgctgaaatattgccaggcgcagactacgccaaaacgtgtggtcaccttcgcctgcgacagcggcaataaatacctctcgaagatgttcaacgacgactggatgcgccagcaggggctgatttcgcgtccgcaggcaggcgatctctcggactatattgccctgcgccacgatgaaggcgcgacggtgactgccgccccggacgacacgctttccaccgtgctggcccgcatgcgcctgtacgacatctcccagctgccggtgctcgataacgacaaggtcgtcggcatcatcgacgagtgggacctgctgcgacacatcgggggagatgccgatcgcttctctctccccgtgacggcggccatgacgcgtcaggtcgaatatctggataagcaggccccggagagcgccctgtacgccatctttgaccgtggcctggtggcgattatttatgacgaagatcgctttctgggtctaatcacacgcagtgatgtactcaccgcctggcgtaaccgcctgacaaaataaaaggagcaaaagatgaaaaacctggccaccctcagcgttcacagcggtgagtatcacgacccgcacggcgccgtgatgccgccaatttacgccacgtcgacgtttgcgcaaccggcaccgggtgaacataccggctacgaatactcccggagcggcaatccaacccgccacgcgctggagacnnnnnnnnnnnnnnnnnnnnnnnnnnnnnnnnnnnnnnnnnnnnnnnnnnnnnnnnnnnnnnnnnnnnnnnnnnnnnnnnnnnnnnnnnnnnnnnnnnnnnnnnnnnnnnnnnnnnnnnnnnnnnnnnnnnnnnnnnnnnnnnnnnnnnnnnnnnnnnnnnnnnnnnnnnnnnnnnnnnnnnnnnnnnnnnnnnnnnnnnnnnnnnnnnnnnnnnnnnnnnnnnnnnnnnnnnnnnnnnnnnnnnnnnnnnnnnnnnnnnnnnnnnnnnnnnnnnnnnnnnnnnnnnnnnnnnnnnnnnnnnnnnnnnnnnnnnnnnnnnnnnnnnnnnnnnnnnnnnnnnnnnnnnnnnnnnnnnnnnnnnnnnnnnnnnnnnnnnnnnnnnnnnnnnnnnnnnnnnnnnnnnnnnnnnnnnnnnnnnnnnnnnnnnnnnnnnnnnnnnnnnnnnnnnnnnnnnnnnnnnnnnnnnnnnnnnnnnnnnnnnnnnnnnnnnnnnnnnnnnnnnnnnnnnnnnnnnnnnnnnnnnnnnnnnnnnnnnnnnnnnnnnnnnnnnnnnnnnnnnnnnnnnnnnnnnnnnnnnnnnnnnnnnnnnnnnnnnnnnnnnnnnnnnnnnnnnnagccatttccaccgtgctcgaactgctggataaagacagccatatcgtcgccattgacgacgtgtatggcggtacgtatcgcctgatcgaaaacgtgcgcaaacgcagcaccgggttacaggtgagctgggttaagccggacgatgtagccggacttgaggccgccattagcccggacacccgcatgatctgggtggaaacgccaacgaacccgctgctgaaactggccgacctggaggccatcgcggacattgcccggcgccataatgcgatcagcgtggcggataataccttcgcctccccggtcattcaccggccgctggaggcggggttcgatatagtggtccactccgccactaaatatctcaacggtcattcagacgtggttgccgggctggctgttgtcggggcaaataaggatctcgcggagcgtctgggctatctgcaaaacgcggttggcggcgttctggatccgttcagcagtttcctgacgctgcgggggattcgcaccctctcactgcgcgttgagaagcacagcgccaacgcactggcaattgcgcaatggctggagcagcatcctcaggtagaccgcgtgttctatcccgggctggcgtcacatccccagtatgcgctggcccgcagacaaatggcgctggcgggcggcatgatctccgttgtgattaaaggcgatgcgcaacgcgcgacagaggtgatccgtcacctaaagctctttaccctggcggaaagtctgggcggtgtggagagcctggtgagccagccctacagcatgacccacgcctccataccactggcgcagcgtcttgcaaacggcattgtgccgcagcttatccgcctgtcggtggggattgaggatgcgaaggatctgatcgccgaccttcagcaggcgctggaaaagtgagcaaaaaacggcgggcgttgcgcctgccgtcataagatgacattagaccttaacgccttgataacaaacttatgtgaatctgcacagattgttttgaaacgctgtttccattttcctttttactgtaaatcagcgtataatgcgcgccaaatccctggtgaatggtttcagcgcttggaatacaaaaaacaacgtacaacttctcctctccttcgttgggctggcactcaggcacactttcttctgcacgctcatttgatgtcacctattcttagtgcgtgtcatatactctttcgcaacacaggtttgactccgcggcggtgcgcccccggagcgagatttccatatccttcccaacttaaagactaagactgtcatgaaaaagacgaaaattgtttgtactatcggcccgaaaaccgaatccgaagagatgctgagcaaaatgctggatgccggcatgaacgtgatgcgtctgaacttctcccacggcgactatgctgaacacggtcagcgtatccagaacttgcgcaacgtgatgagcaagaccgggaaaaaagctgcaatcctgctcgacaccaaaggtcctgaaatccgcaccatcaaactggaaggcggtaacgacgtttccctgaaagcgggccagaccttcaccttcaccaccgacaaatccgttgtgggtaacaacgaaattgttgccgtgacctacgaaggcttcaccagcgatctgtccgttggcaacaccgtactggtggatgacggcctgatcggcatggaagtgaccgcgatcgaaggtaacaaggttatctgtaaagtgctgaacaacggcgacctgggcgaaaacaaaggcgttaacctgccgggtgtgtccattgcgctgccagcgctggctgaaaaagacaaacaagacctgatcttcggctgcgaacaaggcgtggacttcgttgctgcctcctttatccgtaaacgttctgacgtggttgagatccgtgagcacctgaaagcgcacggcggcgagaatatccagattatctccaagatcgaaaaccaggaaggcctgaacaacttcgacgaaatcctcgaagcgtctgacggtatcatggtagcgcgtggcgacctgggcgttgaaatcccggttgaagaagtgatcttcgcgcagaagatgatgatcgagaaatgtgttcgcgcgcgtaaagtggttatcaccgcaacgcagatgctggactccatgatcaaaaacccacgccctacccgcgctgaagcaggcgacgtggcgaacgccatcctcgacggtaccgatgccgttatgctgtctggcgaatctgcaaaagggaaataccctctggaagcggtcggcatcatggcgaccatctgtgagcgtaccgaccgcgtgatgaaaagccgtctggattacaacaacgacagccgtaaactgcgcatcaccgaagccgtgtgccgtggtgcggtagaaaccgccgagaaactggaagccccactgattgtcgtggcgacccagggcggtaaatctgcgcgtgccgtgcgtaaatacttcccggatgcgaccattctggcgctgaccaccaacgaaaccaccgcacgtcagctggtgctgagcaaaggcgtgatcccacacctggtgaaagagattgcctctaccgatgatttctatcgtctgggtaaagaagtggcgctggaactggttgattgtggcctggcccagaaaggcgacgtggtggttatggtttctggcgcgctggttccaagcggcaccaccaacacggcatctgtccacgtgctgtaatatttcacgaacaaattattgttttgttaaaaagcgtccttcggggcgctttttttattcccgcctttaaccagaactattcaaaaagcaaatcgggtttttctatttaatcgcgatttatctaagatgaatccgatgaaaaatgccttttttaacatagctttttcgtcaaaattgccgatttcgttgcttctttgagcgaacgatcaaaaataggcgtaatcccatcaaaaaaatattctcaacccaaaaaactttgtgtaatacttgtaacgctacatggagattaactcaatctagagggtattaataatgaatcgtactaaactggtactgggcgcggtaatcctgggttctactctgctggcaggttgctccagcaacgctaaaatcgatcagctgtcttctgacgttcagactctgaacgctaaagttgaccagctgagcaacgacgtgaacgcaatgcgttccgacgttcaggctgctaaagacgacgcagctcgcgctaaccagcgtctggacaaccaggctactaaataccgtaagtaatagtacctgttaataaaatggcgcacattgtgcgccattttttttgccttcgtcaaacctctactgaagcgctttctctccctcaccttccgccaccgccgctgagacacgactgttctgcaccgacaggacagaattgctggctgacgaaacattgcctgctgaaacggccaccgggatccccgctctgcgcgccagggctttatcgataagcgttttatcgctacctgactccgctgcaaaggcggtaaacgccgccgagtgcgtgaacggcaccgtctgtgggttttcgccctcagcctgcgccagcggcctgtgcacctcgatataacgtttgccgtccggctcgacggagaacttcaccggctcattgatgatctgcacccgcgtgccgacgcgcacttgctcaaacaacgctttgatatccggcgcattcattcgcatacaacccgagctgacccgcagccctacgctgtccggcgcgctggtgccgtgaataagatattccccattcccgatgcccagacgcagcgcaaagcgccccagcgggttatttggccctgcgggtaccacaggcggcagtttaatgccctgggccagtgagcgcgctctgatgcccgctgtgggggtccaggtagggttagggattttctgactcacacgggtggtgctgaccggtgtttccagcccaagctgaccaatacccagcggatagacctgcacgatattttcgcctggcggatagaagtaaagacgcagctccgccagattcaccacaatgccctcgcgctcggtgtctggcagtagcatctgggaagggatggtaatgaccgttcctggcgcagggttcaccggtgcaatggtattattggtttcaaggatgagctgtgcggcggtattaaaccgacgagcgatagactgaagtttattgtcaccttcctgaatggtgtatgtctggttttgcccaatcaggcggctgcctgcgggcggtaaaggataatcaaccgccctggctgaattaacagcactgagcgaaccaaggagtaatagagttattagagacgcgcgcttcatgctgagattccttattcactgaccaaacgtcagaaagctgaaaaaccagcgaggtggaaaccaccccgcgaaacagaatgaatgctgttctgtcagtttagctaaggattgcggctttggcgcgtatggcgcggatcatcgcttccagcccctgggatcgggacggggtgaggtgttgggttaaggccattttttcaaaccacgggcgaacgtcaaaggcgacaatatcctgcgccgacatctgatgataaagaataaatacgacggcaataagccccttcacaatggcggcatcgctgtcaccctgtaattgaattacgccttcgtccgtctgctgcatcaggatccagacctggctctggcagccctgaatgatgttgtccgggttatgcgcctcttcgctgagcggcggcaggcgctgacccagctcgatgatataaaggtatttctcttcccagtttgcgcaacgcccaaagttgcgcagcaatttatctctgtccggcaaatctgccatctctcgcctctccgttagccaagcagctggtgaatacgttttagtcccgccaccagtctgtcgacctcttccgttgtgttgtacatcaccagcgatgcgcggcacatagccggtacctgataatacaccatcagcggcatcgcgcagtgatgcccggtacgcacggcgacgccgtaattatcaaggaaactgcccacatcataggcgtgatgcttgccgaggttgaaggctatcacacccagacggtcagcagggccatataaggtcagttccgggacgctggccagctcctgcaaggcataatgcatcagctgctgttcgtactcctgaatcgccgccagccccgtttcagtgacgtagctaatggccgcgcccagcccgatgatcccgcccgtgttgggcgtacccgcctcgaagcgccagggcgcacgggcgtaggttgtgccgtccgtcaggctgacggtggcgatcattgacccgcccccttcccacggcggcatggcctggagaatgtcctctttcacatacaacacgccgatgcccgtcgggccatacagcttgtgcccggagaagacgtagaaatcgcagtccagggcctgaacgtcaaccgcatgatgcatcaccgcctgggcgccatcaatcaacactttcgcaccaacctgatgggctttgtcgacgatcagcgccaccggattttccgtccccagcacgtttgaaacgtgggtcaccgccaccagccgcgttctgtcgtccagcagggcgtccagcttttccagctggagcgtgccgtcttcattcagggggatcacccgcagttgcgcccccacacgctcacagagcatctgccagggcacgatgttggcgtggtgctccatctgggtgatgatgatgttatcccccgcgtgcacctgcgcattgccccagctgttagccaccaggttgatcccttcggtggtgccgcgcacgaataccagctcttccggcgaacgcgcgttgaggaaggcagcaacctgcgtgcgcacgttttccatgcgctgggtcgcctcggcgctcagggtgtggatcccgcgatgtaccgccgcataaccgtggcggtaaaactcggcttccgcatccaccacctgatttggtttttgcgcgctggccgcactgtcgagataggccagcggcagaccgttcacttcacgggtcagtaccggaaaatctgcccggactttctctacgggaaatgtcatgcttcgcctccaggcagccgctgaccgatacgggccagcacctgctgtttaagtccgccatcgggcagcgcttccgtcagctcagccgcaaaggcgtaaataatcatcttttgcgcggcctgctggtctatcccgcgcgagcgcaggtagaacatctgctcatcgtcaatacgcccgaccgtcgcgccgtggctgcatttcacgtcgtccgcatagatttccagctgtggtttggtgtccacctctgccagacgtcccagcaagaggttgttgttggtcatctgcccgtcagttttgatggcgtgctgcgccacgttgatcaggccgttaaacaccgcacgtcctttgtcgctgacgatggttttgtgcagctgacggctgttgcagtagcctttgttatgctcaagccaggtgcgcgtgtcgcacacttctgacttcaccggcatcgccaggctgttaatacgcagcgtagtgttttcaccgttcagctgggtgctggtattgtggcgcagcaccgcgccgccaagcaggaagctatggctgtacgccgcggcatcctggcccagcagaatatcgttgtgggcgaagtggtgactgagcggattctcaaacgccagcttgatgtggtgcagctgggcattggccgccacgttcatcgtcagacgcgaaccggtaaaatgacgggtgtcgttaaggctgacgtaatgctcgatcaccgtcgcctccgccccttctgccagctcaagatggtggcgatagtgggcggtgttaatctcatcaccctcaacgccctgggtaatatgcatcagcagcagcggtttcgccggacgctggttacgcttaacgcgaatatgggtgacagattgcgacaggctctctgtcaggtgcaggaagacttcaggctgaacgggcgcgttcagcgactgacgttcatcgttaatgacgatatcgaacccgctctcctgcacgctgtcgctcagctccgcacggaacagaccgtcgacaaacaccagacgcacggcatccacgctcagcgccagcatgtcgcgctgatcggggctgacctgcgccagacgggtgacaaactcgccgttcagcaggccatccagcggggtatatttccagttctcatgtttacgcgtcggtaaaccgagacgcagcatctgctggagatggtgctgagcctgttcagagcgcgctccaccctgcgcttcaaacagccggtgccactgctgaagtgcattactgctgttcggtaagccagccataaccctgctcctccagttgtttaaccagcgtaaagtcaccggatttcacaatgcgtccctggtaaagcacatggacatagtccggtttgatgtagtcaagtattcgctggtagtgagtcacgatgataaatgagcggttgccgtcacgcagggagttcaccccgtcggcaacgatcttcagggcatcgatatccagccctgaatcggtctcatcgagaatgcacagcgccggttccagaaccgccatttgcagaatatcgttacgtttcttctcaccgccggagaaacccacgtttaccgagcgggtcaacagatcttccggcattttcagcagcttgatcttctcttccatcagatcctggaagtcaaagcgatccagcgcctcaaggccgcgatacttgcgcaccgcgttcagcgcggtttgcaggaagaactggttgctgacgcccggaatttccaccggatactggaaggccataaagatgccctcgccggcacgctcttccggcgacatctccagcagatctttgccgttaaactcaacggagccgctggtaacttcataatcttcgcgtcctgccagcgtcgctgaaagcgtacttttcccggagccgtttggccccatgatggcgtgaacttcacccggtttgacgtcaaaattgaggccacgcaggatctctttctcttccacgctaacctgtaaatctttaatgcttaacatgtgctttccttaaccgacgctgtgttcaagactaatggcgaggagtttctgggcttcaacggcaaattccagcggcagttcagagaacacgtccttacagaagccgttaacgatcattgaaatcgcatcttcttcactgatcccgcgttgcaggcagtagaaaagctgatcttcaccaatacgtgacgtagttgcctcatgctcaagctgggcgctgttattgcggcattcgacatacgggaaggtatgcgccccgcagtccgcgccaatcagcatggagtcacactgggtgaagttacgcgcgttggttgccgtcggcatgattttcaccagcccgcgatagctgttctggctgtgaccggcagagatccctttggagatgatggtcgatttggtgtttttaccgatgtggatcatcttggtgccggtatcggcctgctgatgaccgctggtcagcgccacggagtaaaactcaccgatggagttgtcgccgcgcagaatacagctcgggtatttccaggtaatggcggagccggtttctgactgcgtccaggacattttgctgttttcgccttcgcacagcgcgcgtttggtgacgaagttcagaataccaccggtgttgccgtcgcccgggaaccagttctgtaccgtagagtacttcacttccgcatctttatggatgatcacctccaccaccgccgcgtgcagctggtagctgtcacgcacaggagcggagcacccttcgatatagctgacgtagctgccttcatcggccaccaggatggtgcgttcaaactgaccggttttttccgcgttgatgcggaaataggtcgagagctccatcgggcagcgcacgcctttcggcacgtagataaaggtgccgtctgacgccaccgccgcattcagtgccgcgaagaagttatcgttactcggcaccacggtaccaatatactttttcaccagctcggggtgatcgtgaatggcttcaccaaaggaacagaaaatgatcccctgctccgccagtttttcacggtaggtggttgccaccgagacggagtcaaaaatggcgtctaccgccacctctttgccttcgcgcacgggcacgccgagctgattaaacgcttcttcaacttctttgctcaggaaactgttctccgcgccggtttgctgaaccgcgccgggttgcgaggcacaggtatcatcacagctgccgcaggagggcgcggagtagtagctataatcctgatagttcagcttatcgtaatgcgctttcagccagtggggttcttccatctccagccacgcgcggaatgcgctcagacgaaactccagcatccactccggctcgttacgtttcgccgaaatggcgcgcacgacctcttcgttgatgcctttcgccagctcatcggtttgcagctgcgtgaagaaaccctctttatagttgaggtgtccgccgctccaggtgtttacatcactcgttgcttcagtattacgagacatagtaccgcctataccccaaagctttcgccgcagccgcattcgttctgggctttcgggttatgaaatttgaataactggtttaaaccttcccgaacgtagtcgacttcggttccatcgataaacggcatcgcctgtagcgcgacgtataactttgcaccgtcagtttcaaagaccagatcgtccttttcaggttcggttacggtatccagcacgtagccaaatcccgcgcagccagtctgcttaacgcctaagcgtacgccgaggatgtcgggattttttgccaccagctcatgaatatgagccgccgccgcgggcgtcagcgttaagccacgccaggcaaaatcggccggattgaaggtttctgaatgcagttccataggtccacctcatctgataagccaccagggcataacaccatgttagtgataacgattatcacttcaaccccctgcgagcaggggctttgggctaaaccgccctttttggctactttcattaagcatagaccctgtgacgggatgcggatgggagggttagatttgttcaatgcattgataaataatgcatttcataagaaagacggtaaggtggcgggcaatgataaaaattgtattggaaatacctatttttgagatagctatcttccaataagaaagctgactcgaaaagacaaaaaggccctgacggaccccttaacatcagtgatggaacgaaacggcgaaaccctgttcacgccagtggtcgagctgctcctgttgacgaggcgtaggcgctttaccggtccagacgaagattttttgcccggggaagagttcaggacgtggagaatcaatcggctcagccagcacgtcgatatgccagcctttgtaggcaagacgggccgcttccagccacaaatgcgtacggtcgtcgcactcccacccaatcagcagcgcatccttacctgctttttttcgcgactcacccaggcttgcaacggcaaactcaatcaggacaccgtccagcaggctcgccatgtgacgcaccgtattctggtcctggttcattcgctgccgcacaggggtgatgatgttatctatcagaacatccatcgcatggtcacggcggaactcgccgattttggcgcgcagttttgccggactggcatagcgcagaacggttaacatctcttcctgaaacgatgcccagtttccctgagtcatcacttctgtattttcaagaagcgcttttactttaccgaccgaaacacccgttttcatcaggcgtttgatctcttcgatacgcaggatatcttcatcgtcaaactgacgatgacccccttcgcttcgctgcggcttcaacaatccataacggcgctgccaggcacgcagcgtaacggggttgataccgcatcgttcggccacttcgccgatactgtaataggccattaactccctcacgcacaatacttccatacctaaccaaaccaaccttatcagattgtacaaatcatttgtataactaactcctcgttctgagacaagtgaatggctcaacgaaccactcactcgttaatgtattgttgtataaatttagccgtacgtacaggtcacttttaagagttacgtacaggtttttataaatcgtactttttctcgggccaggcaatcgccggtatgccccccaggcgcgggctggcgaaaaggtgtccctggaactgagaaatcccggcagattccagccacatccactcttcagccagctctacgcctaccgcacagaacagaatttccagggaggcgcagcatttaataattgactgaatgatcgcctgacgagggccgctcttgtgcacgttggcaatcaagtcacggttaatcttgattctgtccggctgaaactgggccagcagttgcagaccggcgaatcccgcgccaaagtgatcgatggccacgctgatcccggcgcttttaagctgtctgaccgcgctggtgaactcttcgaagcgcgagatcgcctcgctctcggtgaactcgaccacaatttgctccggcacaaaaccgttcgcctcaattgccgtcagtaaaaaatcgacggcgccaggaacattgaccagcgtcatcggcagcagattaatggacaacgtttgagtctgtaggcccagcgcgctggccatcgacaaagccacctgtttactcttcagatccgattcgtacagcgcctcacgcgacaggttggcaaaatagctttccggggactcaccggacggcgtgcggatcagggcttcccaggaaactacctgctgcataaacggatcgacgataggttgaaatgcgaaactacagtccgcgccctttgccactactgtcggctgggaggataacggcgtattttcggtgacaaactcccaggcgtcagccggaggcagctcaaagtagttggctttttcagtggcctcaacgaaggtgcggaaaaattgcagggcgcgatcgttataggtcagctgatagcgcgttgtgcctttatcgagtacctgttgcagcacttcgtcggtatcgtactgacgaaggtcaaagagctccatacccacgttgccaaaacgtcttgaaggcccgtgatcgcttaacaattcgaccacgttgtgatgccgtgggtcacggcagatgagctcatagatctccttaacgttatcagcgggcccttcaagtaactgaaaaaagtgtgtgccgttaaacagcaaaatccccgtcacatcgaactggcgatttctacaatttgcagcagcgaccatgtcttccagcgctttcactggaacgtcctcgcagatatgactgcggtaaatgatggttgtgagcatgctaatcctgaagattgagggggtgaccacgaaaacacgtggggaaaactctgttatagcacattaattgcccaacaaataatttacatctcaacgatttacacggcttttttgcgtcatttacgggcttgtacaactctgcgacgccgcttcggattgtacaatatatcttgtgaataccgcagtaaatcgtataagaataagtaactgataaataatgattttataaaatatattataaaatgtttaaaaaattgtacattttaaatgtacagatttgaaaattatgtataccttaaatgtaacgttactgattacgaaaatttacaggagcgaaacatgcagcagaacggacacctcgcagactcggcaacagcgattgcgcagtatttcgaaaaagccgcgcttccaacccaacaggaaacattgggtcaggttgttgttgaaatccttagcgacgggcgaaatctgaatcgcaaatcgctctgcacaaaactgttgagtcgccttgaaaaggccaatggcccggaagaggaacatcattatcacatgcttcttggcctgctcttcgaacgttaatgtcatgaacagcagtgatgcggacagactgatcgacaagcttattggagaagccgctctttcacttttgaaggagcgcggtcccgtgacgaccgagggattggttcagcgtctgcgtaacatgcaagcatatgaaacggatccccagcggcgggagacattagcgcgagtgatagctgacatcagctctggcacggtcgcttttaaaggtcgcagaaccgcacaaggacgaatacagagagagggatctctcaaaaataaccgagacaatgtagtgccgttatttggaaatggaaaaccgtccgatcctaaaaagatacattgactacaactttacagctacggtgagaacaaatgagacaaaatattcagcttcaacccgaataccactccgcctttttagatagcgcgttgtcggagtatttccgtcacgcaggcgatcgctttgctgaagagtctgccattttttcgactgcggttcgttgtgttcttgcttccgaaggtcatttgaccaacaaagcgatcattctctggctaatccagacgctggaatccaccgacgatgtcgttaaggcggatgtgatccgcaagacgctggaaattgtcgtcggttacaccatggacgatctttaacgcctcccccatccctacggatagcgtgtcatcgtcaattctgacgaacagactgacgatgacacaccctctctccacaaacgccctgttaatcaagaacgctgaatgtggcatggatcctgcttagtccgctaagggactgggctttccagtaaacattgcttcatttcttaacaggtctgttattgatgaaaaaaatcgccagcgtctgcccctactgcggtgcaggctgcaaactaaacctcgtcgttaaaaataaccggattatccgtgccgaagccgctgatggcgtaaccaatcaaggcacgctttgcctgaaaggtttctacggctgggactttcttaacgacacacggctgcttaccccccgtctgacgcagcccatgatccgctacagcaaaggcgaggcctttacccctgttacctgggaagaggccattcgttataccgctcacaggcttaaaagcatcaaagaacagtatggccctcggtccattatgaccacgggttcctcacggggaacgggcaatgagaccaactatgtgatgcaaaaatttgcccgtgcggtgctgaatactaacaacgtcgactgctgcgcccgcgtctgtcacggtccgtccgttgccggtttacaggagaccctcggcaacggcgccatgagcaattccattaacgatattgaaaactcaaaatgcctgctggtattcggctataactgcgccgactctcaccccatcgtcgcccgacgcgtgcttaaagcacgtgaaaatggcgctaaaatcatcgtctgcgatccgcgtcatattgaaacggcacgcattgccgatcttcatcttcagctaaaaaatggcagtaacatggcgctggtcaatgcctttggctatgtcctgctggaagaggaactgtacgacaaaaactacgttgcccgctttacagaagggcttgaggcgtaccggctgacggtaaaagattacgcccccgagcaggttgaacatctgacggggatccgcgcgcgggatgttcgtcaggcaatgcgcatgttcgcagcggcgccttcagcaacggtgatgtggggaatgggcgtcacgcagtttggtcaggcggtcgatgtggtgaaaggtctctccagcctggcgctgctgaccggcaacctgggccgcactgccgtcggcgtgggtccggttcgcgggcaaaataacgttcagggtgcctgcgatatgggcgttctgcccaatatgttccccggctaccaggacgtcactgacccggcggtcagactgaaatttgccgatgcgtggaaaatcaatgtcaaccggatggacgatcgcgtcgggacgcgtatcaccgaagtgccacatctcgcgctggaaggaaagatcaaagcgtattacatcatgggggaagatccgcttcagacagaagccgatctgggactggtccgccgcggctttgaggcgctcgattttgtggtggttcaggacatctttatgaccaaaacggcagaggtggctgacgtgctgctccctgccacctcatggggagagcacgccggcgtgttcacctgtgccgatcgcggcttccagcgtttcggcaaagccattgaggccagcggcaacgtgaagcgcgactgggagatcatcagcctgctggccacggagatgggttatcccatgcattacgaggataaccagcagatctgggacgaaatgcgcgagctgtgccccctcttctacggcgtgacctacgaaaaatgggcgagatgggtcatgtgcagtggccctgtccaaccctcgatcatcccggcactccctacctgtacaaggataatcagttcgacacccccactggcaaaggccagttatttgccgccccctggcgcgccccggcggagnnnnnnnnnnnnnnnnnnnnnnnnnnnnnnnnnnnnnnnnnnnnnnnnnnnnnnnnnnnnnnnnnnnnnnnnnnnnnnnnnnnnnnnnnnnnnnnnnnnnnnnnnnnnnnnnnnnnnnnnnnnnnnnnnnnnnnnnnnnnnnnnnnnnnnnnnnnnnnnnnnnnnnnnnnnnnnnnnnnnnnnnnnnnnnnnnnnnnnnnnnnnnnnnnnnnnnnnnnnnnnnnnnnnnnnnnnnnnnnnnnnnnnnnnnnnnnnnnnnnnnnnnnnnnnnnnnnnnnnnnnnnnnnnnnnnnnnnnnnnnnnnnnnnnnnnnnnnnnnnnnnnnnnnnnnnnnnnnnnnnnnnnnnnnnnnnnnnnnnnnnnnnnnnnnnnnnnnnnnnnnnnnnnnnnnnnnnnnnnnnnnnnnnnnnnnnnnnnnnnnnnnnnnnnnnnnnnnnnnnnnnnnnnnnnnnnnnnnnnnnnnnnnnnnnnnnnnnnnnnnnnnnnnnnnnnnnnnnnnnnnnnnnnnnnnnnnnnnnnnnnnnnnnnnnnnnnnnnnnnnnnnnnnnnnnnnnnnnnnnnnnnnnnnnnnnnnnnnnnnnnnnnnnnnnnnnnnnnnnnnnnnnnnnnnnnnnnnnnnnnnnnnnnnnnnnnnnnnnnnnnnnnnnnnngaacggggattgccgaggccactggtctgggtacgttcacgccggggtaaagtgatcacgcgcgccagcatcagcgagcgcatcaatgcgggagcaatctatatgacctaccagtggtggattggcgcctgtaatgagctgacgcaggataatctcgacccgatctccagaacgccggaaacgaaatattgcgccgtgcagctggaggcgatcgaggaccagcgctgggcggaggattttgcggcttccgcgtaccagaccatgaagacgcgtttgatcgctgcggttaacgtttaaatgcattgccgggtggcggctatcgctgcccggcccgctatccgctgctgttttacgttatctgttgtgcataattattttccaggtaatcgcgaagcaggttcggacggctctttttctccatcagccttctcaacagtacgatcagctcgtaatcgcttcgcagattaaatttctgcatcatcatatatttatgggtaaagaccgttttttcgctcatcttcaacgcgttcgcggtctgcaccaccgacagcccccggtaaaaattgaccatgatacgaatctgttgccgggataaacctttatgctggcagtcgaaacaggtctttttattcaacgtgtaacctggtaattgcgtcctgaaccacgcgataaacagaacgccgctaatacggtcaagcgacgcccggcgcggaagaaaaataatgtcctgaaagcaggaaggcagcgccgaaaagcgcagctcatcgtcgacgagacctatcacaattcctttttgccgggccagtaactccggaaaacaggtcagcgtttccccctgacataatgaaagaacaataatatcggcctggctgacgttttcattggtcagcgccaggtgaaatgtgatggagcgatgaaagttatgcttaaaaaaatcgtcgaaaaagctctgtagcccagcctgaaaaaacagatccgtttcctgaatcagaatatttaacatagttcacaccaacgtctttaataaaggcttgtcaccggcattcagttgtactgcatcgtcattaccacaactgccctgatgcttcccggcgtggcgcctcccggcatggattttaccgaggccagcatagccattgtcgcggttctgtccacggcaatggtctgggtcatactggtgcctgttcctttaagcgcgccggtttgggcatcgcgcatggctatcgccacatgcgtggccgaaccgctgttcatgaaatagtccgctcccgcctcgggatcggggctgccggtgaaagcgacggtcacactctgcgttcccgttgggcactgggtaaacagcagactgaaaggcaccggatccgatgttgagcccggcgtcgccatattggttgcctgaatattgcccaggttgacatcgaggctgttactgccgccattaaatatgcacggcgacgcaacgatatttcccgtcacaccgatgttgacgctatcagcggagcataccttcccgctgagtaaggcaagtaaaagcagtgtcctgcatcttattttcatcttcttacctgctactggtaggtcaaattaagggtggcggaggcattcgctgaacctgactccacgcgggttaacgtctggtaataccgggccgttaatggcaacgtctcttgccccccggcagactgccgcaagaatagtcggctgttcatcaccagcggtgcaccgttatagataagctgcactcccacccctttcgcagtgccggcatttccctgcccggttaaggccatcacgctggtattggcgctgtccgggttctgtattccactgagcgagaccgtaatattggttccggcggcgcaggtcaggcccaggttttgcgtgttctgtgctcccgctggcgtggtgcccaccgtggagccgaacgccgaggcgggaatatcccctatcggaaacgtcagctgggccgtattcaccgtgcacgccagagcattgatggtgccggaggtgagctgcgtggtcagaccgtcacggtagaggccatcgcttccctgaagcgtcacgacgccgatcgtcccgggggttaatacccccgatgagaccgggcccgtcaccaccagctcaatcctcccgccgtaccagtccacataggaggtctgcgcattgtaggaaaatgtattgctcgggttttcaaaatagccgttggaagaaaagcgtatccctatcccgctgacgttcgtgttgtaaacatggttgccgtagctgctcaacgtggcgccgttgtagcgcaggctgaatcccagcatcagcggattcgtacacccggtaagataggagcctgtggctgacgccgcgccagaaaataccaccgtgccgacaggcgcatcgcgctgcacgttgatcgtccccacggacagggtggaaagctgcggggtgatggtggtgcaggtaccggcacgagccatatttgccgccgcgagcaaacagagcagcagcatcgcgttaagacatttcatgttagcgttcctgacggcaggtggcgcgcatatcagcgatcccaccgtacgttgagtgattcggcagcgtgaaatcagcgcggcattgctgactggattgacttccccatgtagcgactaacgttccctgctcgcgcatcccggttaaatagacctgaccgcgatcgccgacaataaaactgccgctgtcatcacctacaagggtgaccaccgccccaaacggaacggcgcggtcgttgtcgatcaaggtcatcagcacccggcgacctgacttcggcagataatcggctctcaccaccgctccccgcgtcggcgtcaccgtgcgagtgttgatctccagctcgacatcgtccggcatcgtttccgggtcgagggtgagatcgtttttccggtagacagaaaggttgctcacgaccgtatatccgcgaaaatctgtccgtacaccgggctgattgcggatatccacgtcgtgggcgccaggagctttgattaagacgctggtctcccccagcggctgggaaagcgtgatgnnnnnnnnnnnnnnnnnnnnnnnnnnnnnnnnnnnnnnnnnnnnnnnnnnnnnnnnnnnnnnnnnnnnnnnnnnnnnnnnnnnnnnnnnnnnnnnnnnnnnnnnnnnnnnnnnnnnnnnnnnnnnnnnnnnnnnnnnnnnnnnnnnnnnnnnnnnnnnnnnnnnnnnnnnnnnnnnnnnnnnnnnnnnnnnnnnnnnnnnnnnnnnnnnnnnnnnnnnnnnnnnnnnnnnnnnnnnnnnnnnnnnnnnnnnnnnnnnnnnnnnnnnnnnnnnnnnnnnnnnnnnnnnnnnnnnnnnnnnnnnnnnnnnnnnnnnnnnnnnnnnnnnnnnnnnnnnnnnnnnnnnnnnnnnnnnnnnnnnnnnnnnnnnnnnnnnnnnnnnnnnnnnnnnnnnnnnnnnnnnnnnnnnnnnnnnnnnnnnnnnnnnnnnnnnnnnnnnnnnnnnnnnnnnnnnnccgccttgcagcccgtaattcaggcgttcactgtttttgtcataaccataacctgccgtgacttcgccataggtgcctttgtagtccgcgttaacattgccggtatagcccacaccctctgttccgtatccctgctgtacgttccagctcagggcacggttctcgagcgctaccccgttcaggccgacgttatgcgtcgtcccgttattcccgctggcgttcatgccatagttagcccatgtctgcggcaaaaatttatccagcggaatgctgacgttgaacgccagaagctggtcatggtcagcgtttttttggctgtcgcgggtttctgacgctgagcggacatttttgctgtaagtccatgtcaggccatagctgatgttgtgccagtagttgctatagccgacgctccacgaagccatcgacttaccgtcattccagtaatcttcccgcgccgcactgagggtaagcgcgcccaggttgtcccccagcgtctggctcatcgtcagctcggcacggttacgtcgcctgtcatgaagcgcgctgctgtcgccgtaagaatcgaggacgtcctgcatcccgtaatagccgcgggtcgagtagcgatacccggcaatcgaaaagttggtcccggtattgataaaattcttgctgtatcgggcccgccacgactgaccgttgttttcgcggcatgctccggcgttgaccagccttgagtgacgtctgcggatacagccccgagatcgcccatattcttgcccacccccagagccgccgactggtacttatctgccccctggacgccgccatagagcgtaataccgtgagggaggccgtaaattccggtcaattgcccgaagggggttttctccacgctacggttatacgagcgatactgcccggcggtaagggcatatttcaggcgcccctcccgttgcaggaccggcagcgaagcgtacggcagggtgaaatgttgctcactaccatcagcttcgacgatcgtgacatcaagatcgcccgcgccgccggtgggatacatatccgcgatctcaaacgcgcccggtgccacatagctttggtagatttgatagccattctgacgcaccacgacctgcgcgttagttcgcgcaataccgcgcaccaccggcgcatagcctttcagggaatccggcagcatatcgtcgtcggacgccagctggacgccgcgaaacggcatgctgtcaaagacatcggcaggcgcggaactgtctccgagcgtaagctgggcttgcaggggaataatcgcgcgctgcatcaaggtatagacgttgtcccacttatcctggccggacgcatcgcgggaccaggtggtgtagttgcgtaaccgccagggaccgacgttgatccccggccgcaggtttgcatactggctgtcgctgcgggtgcctgccccgcttcttgcccggctgtttgccccgctcaggctgtagttgagcatggccgcggtaatgccttcatcccacatatccggcggaacgtaacctctcgctggcaggtctatagccgcctgtggaatgctaatcgccagacgctgggcgccaaactggaaatccgcgctggcctgtgggatcgccctgagatcggcgcattcaccttccccggcggcaagctgtgggaaaagcgccgttttcacgccccacgcttttaactgcccgatactcaggcaaggctgcaacgtttcactgccgttagcatccttcactgccataaaacgaatatcccgcgtttccagcagccgatcgtcaagaataatatcaacgtggtatgtcccgggcgcctgcgagccggattcaaaggcagataaatccgcttttcccattccgggattatccagctctaccagttccgtattaaacgtctcactggcatacagtgtgggagagacaccagcaagcgcgagggcaataaatattgccaggcgcgcaggctgcattgcattcaatgccgttgtcatgacgaacacctgattaacgcgtaaggatcacaaactggcccggtgtaattcgccagggctgccataatcgttaatgactttaaacgtcagcgtattgccactggttccgttcggtaacggaaaacgggctgtgcctgaaggcatcacgtacgtgacatcgtcaagcttcttattacccaacgtaatttcattgaaattgataacgtacggcgtagggttattaacctgaagggtatttcccgcacgacgccaggttaatttattggcttgctcctcgggggtagacgcacgaagagtctctggtcgataaattaatttgatgcgcgttttgacggcaatttgcagcgagttcatctgctttgaggctgaaggaatagctttaatgttcagccagaataaactctcccgcccctgaggcagtgagccggtcatgacaatacgctcaaggtttttttgcccgccgtccagccgatacagtggtggcgtaataataaaaggcgctttacccgattgttcatcctgaacatctatccacgactggattaaataaggaacgttatcaggattagtaatacctattgacgcctcttttttagtcccatcaaaaataatacgggtgccgccaataattactcctgcactgacggatgttaacgtcagcggtaacagcgccatagccaggcccattgtcgtgataaaacgcattttaatacctcataaaacaaggggccgggcggccccctgctgattactgcaatgacttagttgtataccactgagaagtttgcgaccgagttagccgggcccgcggtcacggatgccgcggtggagatatactgcgcgtagaagttcagcgtattatcagccgtactgctgagcgggtaaatatagctgttgctgccgtgcagcggcagatcggctttatctgccgtcatcaggttaatcgccaccccggtggccgcccccgccacggacgtatcaatcgccagcaggctggcgttggttaaatccggcgtgccgtcaaaacggacttttgcattggtgaccgttaccggacagtttttcaaaataatattgaattgcgtcgcagccgttctcgccccggttgtcgggaattccgttttataataatcgcctaataccaccacctgattctgggatgccacatcaacgtcgcaggcagaatccagaatattcccgttaaaattaacggtaccggccgctgcgaatgcattggtcatggtgagtacagaacctgccgctaacattgccatcatcaattttgtattcataattttatatcccgtattactttatttattaccgacattcagttgcagaaacaaaagaccttccgacgagtcaaaatttatacaactctttttccgcatacaatcaattttgaggtctagctgtagaccctcttttaacaattacaaaacatattcactcggaaacaccttaagaataatggccaaagtctacttttagacctgaataaaaaaggtttcaatttcaattaattaagactcaaaaaaaagcgagtctataattagactcgccgcaaacattccctgatctgctggtttttaagataattctttatgccgatcaaaaaatgatcgcatcagtcagtgaggtttcacatgaatacccgtttcgcgcctgagtcagatattgataagtcaacagtgctcggcgccaagccttttaagcacattgaaaaaataatcgataatgttttgccgcatgcggagagaagcattattgccagaggagaaattatccattattgctccggcgatacccgtcaatgctttttactgttgcatggcagcgtggcgttacaccgtcgcggggacggtatcgtcttaaattctgaatccgcgccatttatactcggcgtgagcagccagttatcgtctgaacacctgtacgtcagagcgctggaaacttcagaggtggccagcgtttcgctggcgtgtttcaatcatgttgtcgcacaacagaatttatgggagcacttctcaaacctgctgatctacaccgcatcgcgcgtctacgaacattgtgcccagatatcgcaaatgtcggcttatgacattatccgctttcaactggttgagttgatgcaggagccggaagccataagacaaaacattaccgccgcggcctatatcaaaagccgcacctatctttcacgcagcggcattatgcggatcctcgcggagttgcggacggggaaatacatcaccatggagcgtggcgtactagtagagatccatcacttaccccgtaagtactgaggctgtatttatctctggagaaggtggaaaagaagagcgacactatagagagtacagtctctttccaggttaacgctatgtcttctgacaaaccatcgcatcgcggctctccctatgctcaggaactgatttctcatttacagccgcactgcgccacgcataaaaccgatcccggcgagcaacttgatctccaggttgaagggcagagcatgtgttatttaattcttgacggcacggtcgccatatacagaagaagcgacgacatgatgctttcaacggcgcgcagtcccgccctgtttggcctcgctaacctgacggacatttattttaatgactacctccgaacggtaacgccttgcctgattggtgtgctcacgaccgatcgggtggctgaaattatcaaagagaaggcgctgtgggggctgctttctaatcatctgatgtttgtctataaccgcctctatcacaacgtcatgccgaaaggcgcgccaaccgcgtacgagatgattcgccagcagctcgtgctgctgatgcaggaagatgacagctaccgacgcagcgtgacggcggaaaggtatatcagggataaaacccatctttcccgcagtggcgtaatgcggatcctggctgatctgaaaacgggtgggttcatcgaaatggaagaaggccggctgattaaaattaacaaactgcctgccagatactgaatgtcagacacaaaaaaggccgcgcttgcggccttttcttcactgcttaatggacgtgaacgcccaaccgccaggcaaagtagatctcttctttcagttcgtttgaagagagcgccagcaaatccgtaaattccagctcaagctgtttcagctttttcaggtactgggcgggagacagattgcttttatcgcgacgtaaatattcaattgccagctgtgttggggttatttcagtatccatgatgtcctcgcttatgttcaaaacgtgaccagtatatcacaatcaggcggctaatttttgaccaaaaacaagacatccgaaaactttacacaacggccgtcgtcagcctggatgaacaacacaggcgatcctgctcgtccaggatatcaatctgccacacctgatgacggcttccggcatgcagcgcccggcagacgccgcgcacgcgcccgctgcgaacggagcgaatgtggttggcattgacctccagacccaccaccttctgctctccttccgtacacaggtagcccgccaccgaccccagcgtttcggccagcacgacggacgcgccgccgtgcagcaggccaaacggttgatgagtacggctgtctaccggcatcgtcgcttccagttcgttgtcgccaatgcgcgtgaactggatatccagcaaaccgaccatgttctccgcgcccatggcatttaaggcctccagcgtgaccgcacgtttccagatcatccgataatctccagtaaagcctgcaatggatggcggacgccgttaccttccacccgtttcacctggctgcggcaggagtagcccgtcgccagacagcggttgcgtggcaggcgctgcatcgcctgatgccacgacagctcgtaaatgccgagcgaattagcgtggtttttgacttcatggccgtaggttccggccataccgcagcagcccacgttaacgctttccagcttcgcgccaaaccgggcaaagatagaagcccactgggcaggcgccgtcggcagcgccgtcacttcggtgcagtgcccaaacagataccaggcttctccactcacctcctgagtgggcgtttgcgtcagcaccgcaggcagccactcgtgcaccagtaagacctgaaaatcaccgcgcttatcgccgagcgtctgcttatattcatcccggtaacagagcaccagcgccggatcgacgcccaccatcggcataccgagctgcgccacgcgattcagaaaatctgaagttttctgcgcggttttcgcaaagcgggtgaggaaaccttttatgtgctgcgccttgccgttcggcgagaacggcagcaccaccggctggtagccgattttctcggccaatcggacaaaatcggccaccacctgggcatcgtaatagctggtaaacggatcctgcactaccagcaccaccttcgctttctgctcagggcttaatgcttccagttgttccagggtcatgttagccgagcggtgccccaccagccgacgctggagtgatggcaccgacagcagcggcaggtccaccatgccgatatgtttttctgacagtttgcgcaccagcggctggttgataaagaagttaaaggtttttggcgcacgggccatcagcggcgcgtaactctccaccgtcgccaccagatgatcgcgcatcgggcgcagataacgcgtgtggtacagctgaaggaagcgggaacggaattccggtacgtcaattttaatcgggcactgggttgaacacgccttgcacgccaggcagccggacatcgcctctttcacctcatgcgagaaatcgtattcacctttgttcgcatgccagctgttgcgggtgcgttcgataagcccgcgcaggctggcgcgtttttccggcagctcctgttccagcttgagcgggtcaacgccgcggtcggccagcaggcgcagccattcgcgcaccagcgtggcacgccctttcggggaatgaatgcggttgctggtgattttcatcgacggacacatcgggcttttcacatcgaagttgaagcacagcccgttgccgttgcactccatcgcgccgcgccaggaagcgcgtaccgcaatcggaatttgtcggtcataggtgccgcgcttgacggcgtccacctgcaacatcggcgcatcaatgccctccggcgggcagattttccccgggttaaggcggttatcgggatcaaaagcggcttttaccttacgcagctcggcgtaaagttgttcgccaaaaaacgccgggctgtactcggcgcggaatcctttgccgtgctcgccccataacaagccgccgtatttggccgtgagggccacgacctcgtcggagatctccttcatcaggatctcctgctgcgggtcgcacatgtccagcgccgggcgcacgtgcagcacacccgcgtccacgtgcccgaacatgccatagctcagaccatggctgtcgagcagcgcgcgaaactccacaatataatcagcaaggtgctccggcggcacgcaggtatcttccgcaaacggaataggcttcgccgcccctttcgcgttgccgagcagccccaccgcttttttacgcatcgcgtagattcgctcgatgccggagagatcgttacacagctgccagccaatgacgccgccttccccctgggcaatcagctcgtccagacgctggcagagcgtgcttacctggctctcaatcagctctgcgtcatccccggcgaactcgacgatgttcaggccgagcatctctttatccggcacgtcggtaatcagttcgctcaccgaatgccagacgatatcttcccgggccaggttcagaacttttgaatcgacggtttccaccgacagcgcccgcgcctccaccataaacggtgcattacgcagcgcggagtcaaaggagttgtatttgacattcaccagacggcgcacctttggcaaccgggtgatatccagacgcgcttcggtgatgaaggccagcgtcccttctgacccggtcagtacgcgggtaagatcgaactggctcagatcgtcattaaagacatggcgcagatcgtagcccgtcaggaagcggttaagcttcgggaatttgttgaggatcagttcgcgattttcgcggcagcgctccagcacggtacgataaatccgtccgctggtggtgctctcttttgccagcgtttcggccagctcgatcggcatcggnnnnnnnnnnnnnnnnnnnnnnnnnnnnnnnnnnnnnnnnnnnnnnnnnnnnnnnnnnnnnnnnnnnnnnnnnnnnnnnnnnnnnnnnnnnnnnnnnnnnnnnnnnnnnnnnnnnnnnnnnnnnnnnnnnnnnnnnnnnnnnnnnnnnnnnnnnnnnnnnnnnnnnnnnnnnnnnnnnnnnnnnnnnnnnnnnnnnnnnnnnnnnnnnnnnnnnnnnnnnnnnnnnnnnnnnnnnnnnnnnnnnnnnnnnnnnnnnnnnnnnnnnnnnnnnnnnnnnnnnnnnnnnnnnnnnnnnnnnnnnnnnnnnnnnnnnnnnnnnnnnnnnnnnnnnnnnnnnnnnnnnnnnnnnnnnnnnnnnnnnnnnnnnnnnnnnnnnnnnnnnnnnnnnnnnnnnnnnnnnnnnnnnnnnnnnnnnnnnnnnnnnnnnnnnnnnnnnnnnnnnnnnnnnnnnnnnnnnnnnnnnnnnnnnnnnnnnnnnnnnnnnnnnnnnnnnnnnnnnnnnnnnnnnnnnnnnnnnnnnnnnnnnnnnnnnnnnnnnnnnnnnnnnnnnnnnnnnnnnnnnnnnnnnnnnnnnnnnnnnnnnnnnnnnnnnnnnnnnnnnnnnnnnnnnnnnnnnnnnnnnnnnnnnnnnnnnnnnnnnnnnnnnnnnnnnnnnnnnnnnnnnnnnnnnnnnnnnnnnnnnnnnnnnnnnnnnnnnnnnnnnnnnnnnnnnnnnnnnnnnnnnnnnnnnnnnnnnnnnnnnnnnnnnnnnnnnnnnnnnnnnnnnnnnnnnnnnnnacgacggcatcgggaagaagctggtaaatactgttatcggtcgccatcgtcagcctgtcggcataatcggtggcggtgtcacctgtaaaaccctgttgctccagtgcctgcaaaaaattaagcaccagctgaacgacgcccggtgcctgagaaatctgtgggatcattgctgtcgaccctaatgagaatagtgtgaaatcgtttgcgttgtgtctggaaagttttatcacatttttttcttatgtgcttcgtagaattacgggcaaaatccgcctgtcaaaaatcgctgaaatcactaatgattagagagatgcggtttatattcccatcagccttgctggtgttcatttaaggaaagtttcgtttatggtcaatcttcgtcagcccagggatgtcgcgcagatactgctgtcggtgctgttcttagccattatgattattgcgtgtctgtggattgttcgtcctttcgtgctcggatttgcctgggccgcgaccgtcgtcgtcgcaacctggcctttactcttacgtttgcagaaactgctgtttggtcgccgcggcctggccgtgctggtgatgacgctgctgttgttcctgctgtttattattcccattgcactgctggttaacagcctggttgacagtagcggcccggttattcgcgcggtcaccagcggtgatatgacgctgccggatctcgcgtggctgaacagcattcctgttgtgggcgcaaaactgtacagcggctggcacagcctgctggagatgggcggtagcgcgctgatggccaaagtgcgtccgtacatcggcacaaccaccacctggtttgtggggcaggctgcgcacattggtcgcttcatgatgcactgtacgttgatgctggtcttcagcgccctgctgtactggcgcggcgagcaggttgcgctgggggtacgtcatttcgccacccgactggcaggtaaacgcggcgatgcggccgtgctgctggcagcccaggccgtccgcgcggtggcgctcggcgtggtggtcacagcgctggtgcaggctgtacttggcggaatcgggctggcgatttccggcgtaccttatgccaccattttcaccgtcgtcatgctgatgacctgtctggctcagctcggtccgctgctggtgctggttccctgcattatctggctttactggacgggggacacgacctggggcacggtgctgctggtctggagttgcgtggtgggcaccatggataacgtgatccgtcccctcctcatccgcatgggcgctgacctgccgctgattctgatcctgtccggggtgatcggggggttaattgccttcggcatgattggcctgttcatcggtccggtgctgcttgcggtaacctggcgtctcttctccgcctgggtgcatgaagtgccgccgccgggaaccgaccctgacgtcatcttaagcgaacttgaagaactggaagataagaacgcgcagtaagaacgtaggccgggtggcgctaacgcttacccggctacactctccacagcaatacttaaacgttgctaaactatttattctctgtgcactggtcagacccgccttttcctgcctaaaaccgtcattctcttcaagaaatctttacctgcctttaactattgagacgaatccgatcgactcaaaatcctggcatgcctactattaagacacggttataaatcaacaccttgatttataagcatggaaatcccctgagtgaaacaacgaattgctgtgtgtagtctttgcccatctcccacgatgggcttttttttatcctttttacnnnnnnnnnnnnnnnnnnnnnnnnnnnnnnnnnnnnnnnnnnnnnnnnnnnnnnnnnnnnnnnnnnnnnnnnnnnnnnnnnnnnnnnnnnnnnnnnnnnnnnnnnnnnnnnnnnnnnnnnnnnnnnnnnnnnnnnnnnnnnnnnnnnnnnnnnnnnnnnnnnnnnnnnnnnnnnnnnnnnnnnnnnnnnnnnnnnnnnnnnnnnnnnnnnnnnnnnnnnnnnnnnnnnnnnnnnnnnnnnnnnnnnnnnnnnnnnnnnnnnnnnnnnnnnnnnnnnnnnnnnnnnnnnnnnnnnnnnnnnnnnnnnnnnnnnnnnnnnnnnnnnnnnnnnnnnnnnnnnnnnnnnnnnnnnnnnnnnnnnnnnnnnnnnnnnnnnnnnnnnnnnnnnnnnnnnnnnnnnnnnnnnnnnnnnnnnnnnnnnnnnnnnnnnnnnnnnnnnnnnnnnnnnnnnnnnnnnnnnnnnnnnnnnnnnnnnnnnnnnnnnnnnnnnnnnnnnnnnnnnnnnnnnnnnnnnnnnnnnnnnnnnnnnnnnnnnnnnnnnnnnnnnnnnnnnnnnnnnnnnnnnnnnnnnnnnnnnnnnnnnnnnnnnnnnnnnnnnnnnnnnnnnnnnnnnnnnnnnnnnnnnnnnnnnnnnnnnnnnnnnnnnnnnnnnnnnnnnnnnnnnnnnnnnnnnnnnnnnnnnnnnnnnnnnnnnnnnnnnnnnnnnnnnnnnnnnnnnnnnnnnnnnnnnnnnnnnnnnnnnnnnnnnnnnnnnnnnnnnnnnnnnnnnnnnnnnnnnnnnnnnnnnnnnnnnnnnnnnnnnnnnnnnnnnnnnnnnnnnnnnnnnnnnnnnnnnnnnnnnnnnnnnnnnnnnnnnnnnnnnnnnnnnnnnnnnnnnnnnnnnnnnnnnnnnnnnnnnnnnnnnnnnnnnnnnnnnnnnnnnnnnnnnnnnnnnnnnnnnnnnnnnnnnnnnnnnnnnnnnnnnnnnnnnnnnnnnnnnnnnnnnnnnnnnnnnnnnnnnnnnnnnnnnnnnnnnnnnnnnnnnnnnnnnnnnnnnnnnnnnnnnnnnnnnnnnnnnnnnnnnnnnnnnnnnnnnnnnnnnnnnnnnnnnnnnnnnnnnnnnnnnnnnnnnnnnnnnnnnnnnnnnnnnnnnnnnnnnnnnnnnnnnnnnnnnnnnnnnnnnnnnnnnnnnnnnnnnnnnnnnnnnnnnnnnnnnnnnnnnnnnnnnnnnnnnnnnnnnnnnnnnnnnnnnnnnnnnnnnnnnnnnnnnnnnnnnnnnnnnnnnnnnnnnnnnnnnnnnnnnnnnnnnnnnnnnnnnnnnnnnnnnnnnnnnnnnnnnnnnnnnnnnnnnnnnnnnnnnnnnnnnnnnnnnnnnnnnnnnnnnnnnnnnnnnnnnnnnnnnnnnnnnnnnnnnnnnnnnnnnnnnnnnnnnnnnnnnnnnnnnnnnnnnnnnnnnnnnnnnnnnnnnnnnnnnnnnnnnnnnnnnnnnnnnnnnnnnnnnnnnnnnnnnnnnnnnnnnnnnnnnnnnnnnnnnnnnnnnnnnnnnnnnnnnnnnnnnnnnnnnnnnnnnnnnnnnnnnnnnnnnnnnnnnnnnnnnnnnnnnnnnnnnnnnnnnnnnnnnnnnnnnnnnnnnnnnnnnnnnnnnnnnnnnnnnnnnnnnnnnnnnnnnnnnnnnnnnnnnnnnnnnnnnnnnnnnnnnnnnnnnnnnnnnnnnnnnnnnnnnnnnnnnnnnnnnnnnnnnnnnnnnnnnnnnnnnnnnnnnnnnnnnnnnnnnnnnnnnnnnnnnnnnnnnnnnnnnnnnnnnnnnnnnnnnnnnnnnnnnnnnnntgttcatcaaggatcagccagtacgcgtgcatctgggcaaatttctcttccggcgtcatacgcgccagtaaatcagcgacacgctcgtgtacggaacgtcccgcgtccttgtagatcgcagtcatggtttactcctgtagtgcggattgggttgccgggctgagctgccccgcatcgtttcgactatcgcgtttgctggccagctcgcgggcgatgctgtccaccagccggctgttaagtttgtagatggcaaggagcgccaccatgcagaggaacagcgcgcaggggatcagggtgaacagggcattgatggttgcgagaacgtgaggcgcctggtttgcctgacccggcgcgtaatccaccatgccaagcacccaaccgaccaccgccccacccagcgccagcccaaacttgatggcaaacagggcggtagaaaagaccagcccgtccaggcggcggccgctacggtgttcttcgtagtccaccacatcggagaacatggtccattgcagtggcgtggtcaggttctgaataaaactaaacacaatattcagaccgaatatcagccacacctgcgaaggcggaatgaagaaaatcagcgcgccaaaaataacgaaagaaataatggtccactgataggcacgcacccggtcaaatttccccagcagacgttcagataataatgcgccgcttaaggaggccaccatgccggaaacaataaaggcaaaaaccagttccggacgtaacagaacatagttaacgtaatacatggtcgcagagccacgcgtcacgacggcggttaacagtaaaatattaaacagaaaaacaattcgccactggctattggcggccagcagttttaaatccgtcagcatcgagccggaggtgtcattgcgcggcgagtaacgctcccgggtcataaagaagcagcagaagaataaaacaatacccagcagccccatcaggctcatggcatagaaatagcctttttgcacattcccctggcctaataatgagaccagcggcagcgcgatgaccgttacaatcaacccgccgataaacgacaggccaaagcgccaggattgcagcgagtggcgttcgcgcgggtcgagcgtcagcgcgccgggcatggcgcagtaagggacgttaatcgcggaatagatcaggctcaggatggcataggttacgcaggcatagacaatttttgccgtcgccccggcatccgggacgtagaaggtaatcaggcagctcacgccaaacggaatggcaaaccagagcagccagggacgaaaacgaccgtggcgggtctgagtgcggtccaccagcgcgccaatgcacgggtcgacaaacgcatcgaccacgcgcaccactaaaaacatggtgcccataatggccgcaggcaaaccgaatacgtccgtatagaaataagcgagaaannnnnnnnnnnnnnnnnnnnnnnnnnnnnnnnnnnnnnnnnnnnnnnnnnnnnnnnnnnnnnnnnnnnnnnnnnnnnnnnnnnnnnnnnnnnnnnnnnnnnnnnnnnnnnnnnnnnnnnnnnnnnnnnnnnnnnnnnnnnnnnnnnnnnnnnnnnnnnnnnnnnnnnnnnnnnnnnnnnnnnnnnnnnnnnnnnnnnnnnnnnnnnnnnnnnnnnnnnnnnnnnnnnnnnnnnnnnnnnnnnnnnnnnnnnnnnnnnnnnnnnnnnnnnnnnnnnnnnnnnnnnnnnnnnnnnnnnnnnnnnnnnnnnnnnnnnnnnnnnnnnnnnnnnnnnnnnnnnnnnnnnnnnnnnnnnnnnnnnnnnnnnnnnnnnnnnnnnnnnnnnnnnnnnnnnnnnnnnnnnnnnnnnnnnnnnnnnnnnnnnnnnnnnnnnnnnnnnnnnnnnnnnnnnnnnnnnnnnnnnnnnnnnnnnnnnnnnnnnnnnnnnnnnnnnnnnnnnnnnnnnnnnnnnnnnnnnnnnnnnnnnnnnnnnnnnnnnnnnnnnnnnnnnnnnnnnnnnnnnnnnnnnnnnnnnnnnnnnnnnnnnnnnnnnnnnnnnnnnnnnnnnnnnnnnnnnnnnnnnnnnnnnnnnnnnnnnnnnnnnnnnnnnnnnnnnnnnnnnnnnnnnnnnnnnnnnnnnnnnnnnnnnnnnnnnnnnnnnnnnnnnnnnnnnnnnnnnnnnnnnnnnnnnnnnnnnnnnnnnnnnnnnnnnnnnnnnnnnnnnnnnnnnnnnnnnnnnnnnnnnnnnnnnnnnnnnnnnnnnnnnnnnnnnnnnnnnnnnnnnnnnnnnnnnnnnnnnnnnnnnnnnnnnnnnnnnnnnnnnnnnnnnnnnnnnnnnnnnnnnnnnnnnnnnnnnnnnnnnnnnnnnnnnnnnnnnnnnnnnnnnnnnnnnnnnnnnnnnnnnnnnnnnnnnnnnnnnnnnnnnnnnnnnnnnnnnnnnnnnnnnnnnnnnnnnnnnnnnnnnnnnnnnnnnnnnnnnnnnnnnnnnnnnnnnnnnnnnnnnnnnnnnnnnnnnnnnnnnnnnnnnnnnnnnnnnnnnnnnnnnnnnnnnnnnnnnnnnnnnnnnnnnnnnnnnnnnnnnnnnnnnnnnnnnnnnnnnnnnnnnnnnnnnnnnnnnnnnnnnnnnnnnnnnnnnnnnnnnnnnnnnnnnnnnnnnnnnnnnnnnnnnnnnnnnnnnnnnnnnnnnnnnnnnnnnnnnnnnnnnnnnnnnnnnnnnnnnnnnnnnnnnnnnnnnnnnnnnnnnnnnnnnnnnnnnnnnnnnnnnnnnnnnnnnnnnnnnnnnnnnnnnnnnnnnnnnnnnnnnnnnnnnnnnnnnnnnnnnnnnnnnnnnnnnnnnnnnnnnnnnnnnnnnnnnnnnnnnnnnnnnnnnnnnnnnnnnnnnnnnnnnnnnnnnnnnnnnnnnnnnnnnnnnnnnnnnnnnnnnnnnnnnnnnnnnnnnnnnnnnnnnnnnnnnnnnnnnnnnnnnnnnnnnnnnnnnnnnnnnnnnnnnnnnnnnnnnnnnnnnnnnnnnnnnnnnnnnnnnnnnnnnnnnnnnnnnnnnnnnnnnnnnnnnnnnnnnnnnnnnnnnnnnnnnnnnnnnnnnnnnnnnnnnnnnnnnnnnnnnnnnnnnnnnnnnnnnnnnnnnnnnnnnnnnnnnnnnnnnnnnnnnnnnnnnnnnnnnnnnnnnnnnnnnnnnnnnnnnnnnnnnnnnnnnnnnnnnnnnnnnnnnnnnnnnnnnnnnnnnnnnnnnnnnnnnnnnnnnnnnnnnnnnnnnnnnnnnnnnnnnnnnnnnnnnnnnnnnnnnnnnnnnnnnnnncaccgatgcggtgaccaattgcgcggccttccgcgacaattttgccctgcgcgtgcagggtgtagcgctccatgacttgaccacgtgaacggacggtttccggacgcgcctgcacgataaacagcttgccggtgtgtccgtctttcgcccactcgatgtccattggacggccatagtgtttttcaatctgcaccgcctgcttcgccagctcttccacttcggcgtcggtcagtgagaagcgatcccgctgctcctgcggcacatcttcaatggtgacctgtttgccatgctcctgcgtcggagcatagatcatgcggatttttttcgagcccatggtgcgacgtaccactgccggacggttagccgccagcgtaggcttgtgaacgtagaattcgtcagggtttaccgccccctgcaccaccatctcgcccagaccccacgcggaggtgataaacaccacctggtcgaagccggattcagtgtcgatagagaacatcacgccggaagagcctacgtcggaacgcaccatgcgctgcacgccggcggaaagcgcgacgccgcggtggtcatagccctgatggacgcgataggagatggcgcggtcgttgaacagggaagcaaacacatgcttcaccgccaccagtaccgcctcgtaaccctggacgttgaggaaggtttcctgctgcccggcgaaagaggcatccggcatatcttccgcggtggcggaagagcgcacggcaaaggaggcctgcgcgtcgtcagcggagagctggttgtaggcgtcatggatggctttttccagttccggctggaaaggtgtgtcgatgatccactggcggatttgcgcgccggctttggcaagctcggtgacatcatcaatatccgttttatccagcaggtcgtaaatgcgctggtttacaccgctctggtctaaaaacaggttaaacgcatcggcggttgtggcaaacccgttaggtacggagacacccataccggacagatttgtaatcatttcacccagggaggcatttttgcccccaactctgtctacatcattcatgccgagttggttataccaaagcaccagcggtgacgagccattgttggacatcgaaacaatccttttgtgatatttgatcggagtaagaaacacctgactacgtatttatactggcatatttatttccgctaaaaaaacggtgaatcgtgtaagcaatttaaattttcaacttttcggacagtttcccggcactcgctaacccgatgattcctatagattccggcaaaaaccatagaaataaagccgctattcggaaaatgaaatccacttttcaggaaaatcaaaaacaccatttcattttaaattcagataagttctttgctgtgaaattaacttttttaatttatgctttctaggcaannnnnnnnnnnnnnnnnnnnnnnnnnnnnnnnnnnnnnnnnnnnnnnnnnnnnnnnnnnnnnnnnnnnnnnnnnnnnnnnnnnnnnnnnnnnnnnnnnnnnnnnnnnnnnnnnnnnnnnnnnnnnnnnnnnnnnnnnnnnnnnnnnnnnnnnnnnnnnnnnnnnnnnnnnnnnnnnnnnnnnnnnnnnnnnnnnnnnnnnnnnnnnnnnnnnnnnnnnnnnnnnnnnnnnnnnnnnnnnnnnnnnnnnnnnnnnnnnnnnnnnnnnnnnnnnnnnnnnnnnnnnnnnnnnnnnnnnnnnnnnnnnnnnnnnnnnnnnnnnnnnnnnnnnnnnnnnnnnnnnnnnnnnnnnnnnnnnnnnnnnnnnnnnnnnnnnnnnnnnnnnnnnnnnnnnnnnnnnnnnnnnnnnnnnnnnnnnnnnnnnnnnnnnnnnnnnnnnnnnnnnnnnnnnnnnnnnnnnnnnnnnnnnnnnnnnnnnnnnnnnnnnnnnnnnnnnnnnnnnnnnnnnnnnnnnnnnnnnnnnnnnnnnnnnnnnnnnnnntggataaaatggataatgctgtcgatcgccacgttttttatatttctgatgggacggcgattaccgccgaggtgctgggacacgcggtgatgtcgcagtttccggtatcgataaacagcatcacgttgccgttcgtggaaaatgagagccgggccaaagcggtcaaggaccagatcgacgccatttaccagcagaccggcgttcgtccgctggtgttctattccattgtgatccctgagatccgcaatatcattttgcaaagcgagggcttctgtcaggacatcgtgcaggcgctggttgctcccttgcaaagcgagctgaagctcgacccgacgccgatcgcccaccgtacccacgggttgaaccccggtaacctgaccaaatacgatgcgcgtattgccgccattgactacaccctggcgcacgacgacgggatctccctgcgcaatctcgaccaggcgcaggtgattttgctcggcgtgtcgcgctgcggtaaaacccccaccagcctttacctggccatgcagtttggcattcgcgccgccaactacccctttattgccgatgatatggataacctggtgctgcccgccgcgctcaagccgctccagcataagctgtttgggctgaccatcaacccggaacgactggcagcgatccgcgaagaacgtcgcgagaacagccgctacgcctcgatgcgccagtgccgaatggaagtctccgaagtcgaagcgctgtaccggaaaaatcaaattccctggctgaacagtaccaactattcagtagaagaaattgccaccaaaatccttgatatcatggggctgaatcgccgcatgtactaatatgctagtacattattccggtttcagttattatcatgccatcctcggggcgacgtgccccgaacttgaaatcagcagggattggtttaaggtgatgcccatcacttcccggtagtctgccgatgaagcaaaaaatttctgagacattccatgaataaaaccgacgaactgcgcaccgcgcgcattgatagcctggtcacaccggctgaactggcccggctgcatcccgtttccgccgaggtggcggaccatgtgacggcctcccgtcgccgcatcgaaaaaattctcaatggtgaagacaaacgtcttctggtggtgattggcccctgctccatccacgacctcgacgcggcaatggattatgcacaacgccttcagacgctgcgcggcacgtatcaggatcgcctggagatcgtgatgcgtacctactttgaaaagccccgtaccgtcgtgggctggaaaggattgatttccgatcccgatctgaacggtagctaccgggtgaatcacggtattacgctggcgcgcaagctgctgttacaggttaacgagctgggcgtgccaactgccaccgaatttctggatatggtgaccggacagtttattgccgacctcattagctggggcgcgattggcgcacgtaccaccgaaagccagatccaccgtgaaatggcgtcggcgctctcctgcccggtgggcttcaaaaacggaacggacggcaatacccgaattgccgtagatgccatccgcgcgtcacgcgccagccatatgttcctctccccggataaaaacggccagatgaccatctaccagaccagcggcaacccgttcggacatatcattatgcgtggcggtaaaaaaccgaattaccatgcagaagatattgccgccgcctgcgaaacgctggcggaatttgacctgccggagcatctggtggtggatttcagccacggcaactgtcagaaacagcaccgccgccagctggacgtctgcgaggaagtttgccagcagatccgcagcggctcgaccgccattgcaggaattatggcggagagttttatcaaagaaggcacgcagaagatcgtcgccggacagcaaatggtctacggccagtcgatcaccgacccgtgcctgagctgggaagacagcgagctgctgctggagaagctggcttcagccgtggacacacgcttttaaaatcctgccgggtgacgctgcgcttacccggcctacggtacgtgcccttctccctctccccgtgggagagggtcggggtgagggcatcagaccgcacctctcccccaaatttgatcccgtcacacaattttcacaaaaacgcttgccgtgaatttgcagtttattgataatgattatcattgttacattgattgttatttataaacattatgtcaccgaccgataacagcgcggcaacgccaacaaaaacacacacagcaccctcccctgctcccaccgatcgccgaatcgacagcaaaagcctgttgggtgaggagggacgggtcattatcgagcatgacggccagcactacctgctgcgccagaccaatgccggaaaactgatcctgactaaataaaccagacaacacattcgccagccacccaggtgatccccaggcagccagcgcttttcaattcttatggagagttgctatgccacacctgcaatccgcgtctttacgcccgtctcttctggcgctggcgattgtcagcaccctgccgggcgttacgtttgccgccgcagacgagatcaccgtcaccgccaccggcaatgcccgcagcgcctttgaagcccccatgatggtgagcgtgattgacgccaccgcgccggaaaaccagaccgccagctccgccgccgacctgctgcgcaaggtgcccggtctgatgctggacggcaccgggcgcaccaacggtcaggacgttaacctccggggctatgaccgccgtggcgtgctgatactggtggatggcgtgcgccagggcactgataccggacacctgaacagcacgttcctcgatccggcgctgatcaaacgtattgaagtagtacgtggtccttccgccttgctgtacggcagcggcgcgctgggcggcgtaatttcgtatgacaccgtcgacgccagcgatctgctggatgcaggtaaaaacagcggctatcgcgtatttgctaccggtgcaacgggcgatcatagcatcgggatgggtgccagcgcctatggccgcaccgataccctggacggtctggtctcctggtccagccgcgatcgcggcgacattcgccagagtgacggcgcgagggcgccaaacgacgaatccatcaacaatatgctggcgaaaggcagctggaaaatcgatccggcgcagacgctgagtggctccctgcgctactacaacaacgacgcgcaggagccgaaaaatccgcagaccacggatgccagcagcagtaacccgatgaccgatcgttccaccattcagcgcgatgcccagcttggctaccgcattgcgccagccggaaacgactggctgaacgccgatgcgaaaatttactggtccgaagcgcggatcaacgcccagaacatcgacgccagcggcgagttccgtaagcagactaccaaaggcggcaaagtggaaaaccgcacccgcctgttcagcgactccttcgcctcgcacctgctgacctacggcggggaatactatcgtcaggagcaacaccctggcggcgcgaccaccggcttcccggacgcaaagatcgacttcagctccggctggttgcaggatgagatcactctgcgcgacctgccggtaacgcttctcggcgggacgcgttacgacaactaccgcggcagcagcgacggttacgacgacgtggatgcggataagtggtcatcacgcgccgggttaaccgtgagtccaaccgactggctgatgctgttcggctcttacgcccaggccttccgcgcgccaacgatgggcgagatgtataacgactcgaagcacttctctatcggcagcttctacaccaactactgggtgccgaacccgaacctgcgtccggaaactaacgaaacccaggagttcggttttgggctacgttttgacgatctgctgctcgccaacgacgcgctggagttcaaagccagctacttcgacaccaaagcgaaagattacatctccactaccgtcgattttgcggcggccaccaccatgtcctataacgtaccaaatgccaaaatctggggctgggacatgatggcgacctacgcgaccagtttgttcaacctggacgtggcctacaaccgcacgcgcgggaaagataccgacacgggcgaatacatctccagcatcaacccggacaccgtcaccagcaagctggatatccccgtggcgcaaagcggcttctccgtgggctggatcggcaccttcgtcgaacgttcaacgcacatcagcagcagctacagcgagcagcctggctacgcagtgaatgatttctacgtcagctataaaggtcagcagcagttcaaaggcatcaccaccaccctcgtgctggggaacgccttcgacaaagcctactggtcaccacaaggcatcccgcaggatggccgcaacggcaagatcttcgtcagttatcaatggtaattcccttcggggcaacgattcagaaggataagattatgggtcactacacacgctggcttgagcttaaagaagaacatccgggtaagtacgcccgtgatatcgccggattaatgcacatcagcgaagcagagctggcatttgcgcgcgttggacacgacgcctggcggctgcgcggtgaaatccgtgagattctggcagcgctggagtcggtgggggaaaccaaatgcatctgccgtaacgaatacgccgttcacgaacaggtcggggcgtttactaaccagcacctcggcggccacgccggactggtgctgaatccgcgcgcgctggatctgcgtttgttcctcaaccagtgggcgagcgcgtttcacataagtgaaacgacttcccgcggcgaacgtcagagcattcagttcttcgatcatcagggcgacgctttactgaaggtctacaccacggatcacaccgacgttgccgcctggggcgacgtgctgacccgttttatcattgccgataaccccactctggcactgaaggctgtcgatgcccctgcgcattccgacggtgctgatgcaggctcggtggagaaagagtggcgcgccatgaccgatgtgcatcagttctttagcttactgaagcgccataacctgagccgccagcaggcgtttcgtctggtgagtgacgatctggcctgtaaggtggataacagcgcgctggcacagctgctggagacggcgcgacaggacggaaacgaaatcatgatcttcgtcggcaaccgcggctgcgtgcagatcttcaccggtgtggtggaaaaactgacgcccatgaagggctggctgaacatcttcaacccaacctttaccctgcatctgctggaggagactatcgccgagacgtgggtaacgcgcaagcctacggcggacggacacgttaccagcctggagctgtttgctgcggacggaactcagatcgcccagctctacgggcagcgtaccgaaggcgagcctgagcagaaccagtggcgccgccagattgacgccctgacgccagaagggctggccgcatgaaaaactggttcgccctgctctgcgccctgccgctggtcgccgtcgccgcgccggagagaattgtcgccctcggcggcgacgtgacggagatcgtctacgccctcggcgcggagtcttctctggttgcgcgcgacagtaccagccagtggccgcaggcgacaaacgcgctgcctgacgtggggtatcttcgccagctgaatgcggaggggattttatccgtacgcccgacgctggtgctgtcaagcgaccaggcgcagccctctctggcgctgaaacaggttgaacagagccacgtccgggtggttaccgttcccggcacgcctgacctgcgcacgattgacgaaaaagtacgggtgatagctcaggcgacgcatcatgaggcgcaaggggaaaccctgcgcaactcgctgcgtcaggcgctggcggcactgccctcaacaccgctcaacaagcgggtgctgtttatcctcagccacggcggaatgaccgcaatggcggccgggcaacagaccggcgcggatgcggcaatacgcgccgccgggttgcagaacgccatgcagggctttacccgctatcagccgctttcccaggagggggtgatggccagccagccggatctggtggtgatttcgcaggacggtcttaacgcgctgggcggcgaagaaaatctgtggaaactgcccggcctggcgcaaactccagcgggacgaagcaagcagatgctggctattgatgatatggccctgctgggcttcagcgtccgcacgccgaaagccatacaacagctgcgtgccagagcggagcaactgccctgatgtcccggcgcatcacgttatcgttatggcttctggcggggttgcttaccgtcatgacgttcatggccaccggttttggggcgttacgcctgccggtgaacgtgctgtggagcggcagcgatgagacgctacgccagatctggcttaccatccgtctgccccgcgtactgctggcgctggtgattggcggatcgctggcgctcgccggctgcgtcatgcaggggctgttccgcaatccactggccgacccgggcctgctcgggatcagcagcggtgcggcgctggccgtcgccctgtgggtggtgctcccgctctcgctgcccgcgctggtgatgctttacgcccctatgctggcggcatttcttggggcgctggcagccactggcgtgatcttcctgctcagcaagcagcgtgacccctctctgtcacgtctgttgctggtgggtatcgccatcaatgccctgtgcggtgcggcagtgggtgtgctttcgtgggtcagcaatgacgcccagctgcgtcagctttcactctggggaatgggaagtcttggtcaggcacagtggtcaacgctgctcgccgtgacctcgctgatggtgcctgccgttctggcgatctggcgttgtgccgtcgcattaaatttactgcaactgggtgaagaggaagcgcattaccttggcgtggacgttgcctttgtacagcgaatattactgttatgcagcgccctgctggtcgctgcggctgtcgccgtcagcggcgtgattggctttgtcggactcgtggtgccgcacctgatgcgcatgtggctgggcgccgatcaccgggcaaccctccccggcacggtactcgcgggcgcattactgctgctggtggcggatacggtcgcgcgcaccctggtcgctccggcagaaatgccggtcggcctgctcaccagtatccttggcgctccctggttcttatggctcatttttcgtcgtggagaacagcatggctgaacgttatacggctgaaaatcttacttttacccggtctggccgcacgctgacagataacgtttcgctgtcactgtcgcagggagagctggttacattgatcggccccaacggcgcggggaaatccacgctgctgcggctgctgaccggctacctgaaacccgacagcggcggctgttcgctggcgggaaaagcgctggatgaatggcatccgcagacgctgtcccgctatcgggcagtgatgcgccagcagtctcagcctggatttgactggcaggtggaggagatcgttggcatggggcgtgcgccctggacgcgtcacccggaaccgtcgattgtgcgtgaggtgttgcagctgaccggttgcctgccgctggccggcaggcgttatcatgccctctccggcggcgagcagcagcgcgtccagctcgcccgcgcgctggcgcagctgtggcgtgacggaacgccgcgcggctggctgtttctcgacgaacccacttcagcgctggatctctaccaccagcagcatctgctgcgcctgttgaaatcgctgacccgtcagggccatcttcacgcctgcgtggtgctgcacgatctcaatcttgccgcattatggtcggaccggatcctgctgttacacaacggcaggattgtttctcagggcataccggagacggttttgcaggccgacgcgctggcacactggtacggtgcgcaggtgcacgtcggcagacatccggcgcacgccgcaccgcaggtttttctcgccccttagcttgagcagctcacttccagccgcttgccccagtccggcgggcggctgacatagtcatcctcccggtcggcaaacggcgtgcgcagggcgatatgcagccgatgcagctcggtataatccccctgctctgcctgctcaatggcccgctgcgccagccagttgcgcaacaccatcgccgggttaaccgccttcatccgcgtctggcgggtatcgtcatcaatctgttcctgctgtaaacgcgtccggtaaacggcaaaccagtcatcaaacgcctgacgatcgatgaactcgtcgcgcagcggtgacgcggcgctctgctgcgcggtctggctcagcatacggaaggttcgggtatagtcgctgccttcacgcgccatgatggcaaacagcccattcaacagcgcgttatcgcttttttcctgcgtcatcagccccagcttgttgcgcattaacacaccatattcccgcagcaggatctcctgatagctgtccagcgcatcgttcagggcatcgacgtcgataaacggcgacaggctttgcgcaagccgctgaaggttccacagccccaccgcaggctggttgtcgaaacggtaacgcccctgatagtccgaatggttacagatgtaacccggctgatagtcatcaaggaagccgtacggaccgtagtcaaacgtcagccctaacagggacatgttgtcggtattcatcaccccgtgggcaaagccgacggcctgccagcgggcaatcattgcggcagtgcgcgcgacaatatcacggaaccagagaacatagcggtccggctcgttttgcaggtgcggccagtgacggcgaagggcgtaatcggcaagctggcggaccttatccggctcgcggcgatagtagaagtgttcaaaatgaccgaaacgcagatggctttccgccacgcggatcagcatcgccccctgctccatcgtttcccgggccaccggcgtgtcgctggtgacaatggacagcgcgcgtgaggtggggatccccagggcatgcatcgcctcggaagccagaccttcacggatggttgaacgcagcaccgcgcggccatcccccatgcgtgagtacggggttagccctgcccctttcaggtgccagtcgagcgtttcgccattcggcagaagctgttcacccagcaggatgccgcggccatcgccgagttgtcccgcccagacgccaaactgatgtccgctgtagacctgagccagcggcttcatgcccgggagcagcgtttcgccgccccagacgccggcgcctttttctggctgaaaaagcgtcgaagggatgccaagcgaatccgctaatgcatcgttatgccagataagacgcgcgttctgtaatggcgttggcttaagcgcggtgtaaaagccgggtaattcatcgtgccagtgagcagtaaaagacagggtcataagtcctcctgctttaagtgtagagggtttccctggacgtaaacacgggcgaagaaaggggttattgctgaacgagagtcgtgacccgctctgccgggacggcaggccacaggcttccctgcattgcaccaaaattgaagggcagcacgcgttgtaagnnnnnnnnnnnnnnnnnnnnnnnnnnnnnnnnnnnnnnnnnnnnnnnnnnnnnnnnnnnnnnnnnnnnnnnnnnnnnnnnnnnnnnnnnnnnnnnnnnnnnnnnnnnnnnnnnnnnnnnnnnnnnnnnnnnnnnnnnnnnnnnnnnnnnnnnnnnnnnnnnnnnnnnnnnnnnnnnnnnnnnnnnnnnnnnnnnnnnnnnnnnnnnnnnnnnnnnnnnnnnnnnnnnnnnnnnnnnnnnnnnnnnnnnnnnnnnnnnnnnnnnnnnnnnnnnnnnnnnnnnnnnnnnnnnnngaatagcgcgcataaaggttacaaacgagagtgccgacgcgcgctgctggtataaagtttttatccagaatcacccgtttgaacagaccatcataaaccggtttaagggaagatgcccctgcaccaaagttagccagtactaaggggaaatggatcgccattcttgccagacagggatcgtctttcccgttatttaaacctggatagttctcattaacagtaaactcaagaaacggataacgctcgaggattgaaacagcgttctcattagttaataaaaactcaacaattgcaggtgtaatattgatccatgcaattaactgatgctgaataaaaaatagcttacaggtatcgagtaattgcagtttctcctgaaacagcgctaattcatcttcctgagaaagatgtgggataaccagttcagtcgggatccgtacgtccgcacccacgccagtaaagttaaccaaaatctctaaacctttaagcaaacctgcactatcacgcgccggaaggagtaaaagttcagactggtaagcattatctagcgtaataatcatcgcgcttgtcctgcattaaagatgagagagaacatcctggagcaattgcaggcacaattccactgtcttgattttaataagattaatttcattctttccgtattaattttcagatttttcccttgaatctaaattaattttatcctggttattgaataatagccagttttagataaaacaggcacatgcggacataaataattgggcaaaaatttaactttaatccaacccgcaagaaaagcctgacgtctattttcaccgccaggccctccgcactgcatttttatgcagcggttaaatacgtctggcctgccagaagtttttacgccagtaaacattatccagagaggagcgcatcacgccacggctggtcgaggcatgaatgaactgattatcggtatcatagatgccgacatgaaggccgctttcaccggagcccgttttaaaaaagaccagatcgccgggcaggagctcgtctttatcaatttcagtgccgattttcgcctgcatacgcgtttcacgcggaagctggaggtcaaatttatcgcggaaggtcatcagcacaaatcccgagcaatccaccccgccccggctcatgccgccgtagcgataaggtgtgccgcgccagttgctgagctgatcgttcaggctggcaatgaccgtaatggaatcggaaagccgtgggttgggcggaggtgcacgatggctgctgcatcctgcaagaaagagcgccgcaacaaggagaaaccagaatcgcatttcagacgaatcctctgctttttttgttctttcggtaatttagcgtgcatctatgcagctgtgcaagaaaggttattcctgcgccgtggaaatgagcatcttgtggccttcaatatccagcctccggaacgacatgtggtaagcgctcgcaagattggcggccgtcagcacgctgtcgcgcgttccgctggcaatcagcttgccacgcgccagcaaccacacccgatgcgcgtggcgcaacgtatggtttaaatcatggctgctcatcacaatggcaatccccttgcgacacagcgcgctgagcagggtatccagcgctgcctgttgggcaacgtccagcccactcatcggctcgtccagcagcagcaaccgcccgtgaggatttcccgccggatggatctgaaggataacggccgccagacgaacgcgctgccactcgccgccggaaagctgatttgcctgccgggtaagcttgtcgtctaacccgagtgccgcagcaacctcgttgagcaatcccacctgatttttgtcaggcagatgcagcgtcaggtagtgccagacgggcatcgcaaagggcggaacctgctgctgaaccagatagcttcgacgggaggcaagtgtagcgggtagccagtcgacgagcgattgcccgagaaaggtaatctttccttccccggtggtcagccccgccatgcacgccagtagcgtgctttttccggcgccgtttggcccaaccaggtgaaggatttcacctgcgttgacttcggcggtaacaggctcaagacgccccttgccggcaacgtccgtgagctgcatcagcagcgtcattatttcgccagcgccagcttaattgattccatcacgataggatcttcaggcgtcatgtcaggcgaaaaacgctgcacgacctgaccgtcacggccaatcaggaatttttcgaagttccacagaatatcatccggatagagcggcgcgcggcctttacttgccatacgctcatagaaaccactctcttcaggcgcaacggcggtcggcgccgcggccaccagtttggcatacagcggatgacgattttccccgttcacatcaattttgctgaacatcgggaacgtcacgccataggttgtgctgcaaaaggtcttaatctcctcttcgctgcccggctcctggcccaggaactggttgcacgggaagccgagtacggtaaagccgtctttttcccaggctttatgaatgttttccagcagttcatactgcggcgtaaggccacatttcgacgccacgttcacgatgagcagcaccttgcccttgtagccttccagcgtggttttctcgccgtcaatggtcgtcacttcggtattcagaatatcagactgcatagcattccctcaggttgacttacaggttgtgttttaacgtccagcttttaatagtagccagataaagaccggtgcgcccagcgttgcggtcaccacgcctatgggcaactcagcggccgtcagggcgagccgggcgatgatatcggcaaccagcagcgttgccgccccggcaaccgccgaggccgggagcagggttcggtggtccgtaatgccgcacaggcgcagcatatgcgggatcaccagcccaataaagccaatcgcccccgccagcgccacgcttacgcctaccatccagccaatggcgataaccagcacgttgcgccagaatccaatcggcatcccgagctggcgagcagacgtttcgcccagcgcgagaatattaagaggctgcgcctggaacgccgtccacaggatgaccgggatcaggagcaccatcagccacccctgacgccagtcaacacccccaaactccccccatcatccagtacattaactggcgcagatcgaaggaggtagaaaagtagacggcccagnnnnnnnnnnnnnnnnnnnnnnnnnnnnnnnnnnnnnnnnnnnnnnnnnnnnnnnnnnnnnnnnnnnnnnnnnnnnnnnnnnnnnnnnnnnnnnnnnnnnnnnnnnnnnnnnnnnnnnnnnnnnnnnnnnnnnnnnnnnnnnnnnnnnnnnnnnnnnnnnnnnnnnnnnnnnnnnnnnnnnnnnnnnnnnnnnnnnnnnnnnnnnnnnnnnnnnnnnnnnnnnnnnnnnnnnnnnnnnnnnnnnnnnnnnnnnnntgatccccaacgctaccccggcaagcagcagccgactggtggataagtggcggcgggcaaagcgcagaaggataagggttatcaacagcgcgccaaggatggcgctgaggctaatcccccagccggagagctcgcctccccccagcatcacggcggcgataagcccgacgcctgcgccatttgacaccccgagaagcccgggttccgccagagggttttcaaataatgcctgcatgatcgtgccgcacagcgccagcgcagcgccaactaaaaggacagccaacgtccgcggcaggcggatctgccagacaaagagctgtccttcaggcgtaaaccagctttccggccccagccaccgatcgcccgcacacaggctgacggtggtggcgacaatcaacagcaccccgagcagacacaggcggcgaagatcggagcggtgctggcggcgggcaagatcaagcatagacgataggttatccggttgagatatcattgattttacggcgggtttagcaaatagcgcaaagaaaaaaggccgcgtgagcggcctttttagttagttcatattactctgctttgggcgttgcgttttcgacacggctttttaacttctgtccgggtctgaaggtcaccacgcggcgggctgtaatgggaatatcttcccccgtcttcgggttacggcccggacgttggtttttgtctcgcaaatcaaaattgccaaaaccggagagtttaacctgctcaccattttccagagcacgacggatctcttcgaaaaacagctctaccagctctttggcatcccgtttgctaagcccaagcttatcaaacagatattctgacatttcagcttttgtaagcgccataggttcaatccctcaatgatgcctggaatcgctcttttaatgcctctacacatttggcgacggtagcggcaatctcctcttcttcgagtgtacggctggtatcctgaaggataaggctaatagcgaggctcttgaaaccttctgctacgcccttgccgcggtacacgtcaaataagtttacgccaactacctgatttacgccaactttcttacattcggccaaaatatctgctgcgggcacattttcagcgaccacaaccgcgatatcacggcggtttgccgggaagcgggagacgtcctgcgcctgaggaatgacgcggtctgcaaccgggttccactccagttcgaatacgatggtacggccattcagatccagcttacgttccagttccgggtgaacaaccccaatgaaaccaacacgtttgccgtctaaatagatcgccgcactctgacccggatgcagggctggaatcgcttctgcgcggaattcaatttcggataatttaccggtcagatcgagaatcgcttccagatcgcccttcatatcgtagaaatcaaccgtcccttttgccaggtcccagtgctcttcaaagcggttaccgctgatggcgccggccagcatgagatcctgacggatgcctaaattcgcctgagtatccggtacaaagcgcaaaccgctttcgaaaatacgcacgcggttttgctgacggttctggttataaacgatagtacccagcagtcccgtccacagggacagacgcatcgctgacatctcgctggaaatcgggcttggcaggatcagcgcttcctgacccgggtggatcagctgttgcagcttaggatcaacgaagctgtaggtgatcacttcctggtagcctttgtcgttcagcatggttttcacacgcttcagagacagatcggcctcgcgatggctgcccatcaccagacccgcctgcaccggctcgtcagggatgttgttgtagccgtaaacgcgggccacttcttccaccagatcttcctcgatctccatgtcaaaacgccaggacggcgcaacggctttccactcgtcctgaccctcagtaacttcgcagcccagacgcgtcagaatgtcggtcacctgcgcatcggcaacgtggtgaccaatcagacgatccagtttgctgcggcgcagggtaatggtcgcacgcttcggcagcgtcgcttcgttggtcacatcgataaccggacccgcttcgccgccgcagatgtcgatcagcaggcgagtcgcacgctccatcgctttgtattgcagcgcaggatccacgccacgctcgtagcggtgagaagcatcagtgtgcagaccgtgacggcgtgcgcggccggtgatggagagcgggctgaagaacgcgcattccagcaggacgttttgcgtctcgtcgttgacgccagagtgctcgccgccgaagatcccgcccatcgccagcgctttgttgtgatcggcaatcaccagggtgtcagcgttcagtttcgcttcgctgccgtccagcagaaccagggtttctccctctttcgccatgcgcacgacgatcccaccttcgatacgatctttatcaaaggcgtgcattggctggcccagctccagcagaacatagttggtgacgtcgacgactgcatcgatagaacggataccgcagcgacgcagtttctctttcatccacagcggggttggcgctttaacgttaatacctttcaccacacgaccgaggtagcgtgggcaggcctcaggcgcgtctacctgtatcggcagcacgtcactgatggttgcctcaaccggagcgatctccggcacgttcagttcagtctggttcagcacggccacgtcgcgggccacaccgatgatgcctaaacagtcagcacggtttggcgttacgctgatttcgatggtgttgtcatcaagcttcaggtattcgcggatatcagtaccaactggcgcatcctgcggcaattcaataatgccagagtgatcgtcggaaatacccagttcggagaaggagcacagcatgccttcagacggctcaccgcgcagcttagccgctttgattttgaaatcgcccggcagcaccgcaccgacggtcgccacggccactttcaggccctgacggcagtttggcgcaccgcagacgatatccagcagacggtcaccgcccacattgacttttgttacgcgcagtttgtcagcgttagggtgctgaccgcactcaaccacttcacccacgaccacgccggtgaaggcgccagaaaccggctctacaccgtcaacttccagacccgccatggtgatctggttggaaagcgcgtcgctgtccagcgtggtgttcacccattcgcgtaaccacagttcactgaatttcattgttctgtcctgcccttatttaaactgtttgaggaaacgcagatcgttttcgaagaacgcacgtaagtcggttacgccgtagcgcagcatggtcagacgctccatacccataccgaacgcaaagccggaatacacttccggatcgatacccacgttgcgcagcacgtttggatgcaccatgccgcagcccagcacttccagccatttgccgtttttacccatcacgtcaacttccgcagacggttcggtgaacgggaagtaggacgggcggaagcgaacctgcaaatcttcctcaaagaagttgttcaggaaatcgtgcagcgtgcctttcaggttggtaaagctgatgtttttatcaacaatcagaccttccatctggtggaacattggggtgtgggtctgatcgtagtcgttacggtatacgcgacccggcgcgatgatgcggattggcggctcctgctccttcatggtacggatctgaacgccggaagtctgagtacgcagcagacgggtagcgtcaaaccagaaagtgtcgtggtcagcacgtgccggatgatggccaggaatgttcagggcatcgaagttgtggtagtcatcttcaatttccgggccagtcgccacggtaaagccgagctcaccgaagaaactttcaatacgatcgatagtacgagtcaccggatgcagaccgccgttttcaatacgacgacccggcagagaaacgtcaatcgtttctgccgccagacgcgcattcagtactgcgctttccagctcggctttacgcgcgttcagcgcctgctgtacctgctctttggcttcgttaatcactgcaccggctgccgggcgctcctctgctggcagttcacgcagggtagtcatctgaagggtcaaatgccctttcttgcccagatattcgacgcggacattgtctaacgcggcaacatctgaggcctggttaatggcggccgttgcactggcaaccagctctgcgagatgtgacatggttttcctcattatgtcggtgcagacaccgaattgttggacgtattctcttaacttcaggcacaaaaaaagcctccatcgggaggcttatctggcgctgtttttcgtttcatctttcacgcgctagcctcctgaagtcaggtgctaaagtaaaagaagaagcggaaaatagcagcattcatgcttgcgttaccttgtagggtaaaaaccgttaagaccttattgaaaagcctgcacggataaatgtcaatcttctgatggtgttaaatgaaaagaggaggcaaagccccctctctcaactggcttatgccagtgctgctttcgctttttcgaccagagcggtgaacgctactttgtcgaatactgcgatgtcagccaggatcttacggtcgatttcaacagaggcttttttcaggccgttgatgaatttgctgtaagaaataccgttctgacgtgctgctgcgttgatacgcgcaatccacagttgacggaactgacgcttacgctgacgacggtcacggtaagcgtactgacctgctttgataacagcctggaaggcaacgcggtatacgcgtgaacgcgcaccgtagtagcctttagcttgtttcaaaattttcttgtgacgtgcacgtgcaattacaccacgttttacgcgagccatgtgtgctctcctgtatctattctaagttaaaaaagttaaacgttaacgacttatgcgtacggcaggcacgcgatgaccaggcccagatcgcctttagaaaccatggcttttggacgcaggtgacgtttacgcttggtagctttcttagtcagaatgtgacgcaggttagcgtgcttgtgcttaaaaccacctttaccggtttttttgaagcgcttagcagcaccgcgtacggtcttaatttttggcattttaataacttccacttcgcattgttaaataaacgaaacataggcgaacaaaacctatggggcccgaaggctccacagattttgctgcttgaaggccttactgtttcttcttaggagcgagcaccatgatcatctggcggccttcgatcttcgtagggaaggattcgactactgccagttcactcagatcgtcacggacgcggttaagcacttccataccaatctgttggtgggccatctcacgaccgcggaaacgcagcgtgatcttggccttatcgccatcttccagaaagcgaatcaggctgcggagttttacctgataatcgccatcgtcggtaccaggacggaatttaatttccttaacctggataactttttgcttcttcttctgttccttagaagacttactcttttcataaaggaacttgccgtagtccatgatacgacaaactggcggttcggcgttagggctgatttcaactaaatctactccagcttcttcagccttttcgatcgcttctctcagactcacaatccccagctgctcgccttccagacctgttaagcgaacttcctgggcgcgaatctcgccattgatacgattcggacgtgccgtttgaactcgttttccgcctttaataccttattcctccagttgttgaagactgcggctgcgaatctcttgttgcagcttctcaatcacttcacttacgtccaggctccccaggtctttaccacggcgggtgcgaacggcaactttgcctgcttccacctctttatcaccacagaccaacatatacgggacacgacgtaaagtgtgctcgcggattttaaagccaatcttctcatttctcaagtctgcttttacgcgaatgcccgcattttgtagtttctgcgtcaattctttaacgtaatccgcctgagaatcggtaatgttcatcaccactacctgcactggcgcaagccaggttgggaagaagcccgcgaactcttcggtcaggatgccgatgaagcgctccagtgaaccgagaatcgcacggtgaatcataaccggcacctgacgctcgttgtcttcgccaacataagaggcgcttaaacgctgcggcagggagaagtccagctgtaccgttccgcactgccatgcgcgatcgaggcagtcatacagggtaaattcaattttcggaccgtagaatgcgccctcgcccagctggtattcgaacggaataccgttctcttccagcgctacggcaagatccgcctctgcgcgatcccatgtctcatcgctgccgatacgtttttccggacgcgttgagagtttgaccacgatcttctcgaagccaaaggtgctgtacatatcgtagaccatacgaatacaggcgttaacttcttcacggacctgatcttcagtacagaagatatgcgcatcatcctgagtaaagccacgaacacgcatcagaccgtgcagcgcacctgatggctcgttacggtggcagctaccgaattccgccatacgcagcggcagatcgcggtaggatttcagaccctggttgaagatctgaacgtggcccgggcagttcattggcttgatgcagtattcacggttctcagacgaagtggtgaacatcgcatctttgtagttgtcccagtggccggttttttcccacagcacacggtccatcatgaacgggcctttcacttcctggtactggtactctttcagcttggagcgcacgaacgtttccagttcacggaagatagtccagccgtcgttatgccagaacaccatccccggcgcttcttcctgcatatgatacaggtcaagctgcttaccgattttacggtggtcacgcttagccgcctcttccaggcgttgcaggtacgcgttcagggccttcttatcggcccacgcggtaccataaatacgctgcaacattttgttgttgctgtcgccacgccagtaagcgcctgcgattttcatcagtttgaagtgatgacagaagcgcatgttcggcacgtgcggtccacggcacatgtcgacgtattcctggtgatggtacaagccaggcttgtcatcatgagcgatgttttcatcaagaatcgagactttgtagctctcgccgcgcttcacgaaggtttcacgcgcttcgtgccagctgactttcttcttaatgacgtcatagttggtttcggcgagctcgtgcattcgtttctcgagcgcgtcgatatcttcctgagtcagggtgtggtcaaggtcaacgtcgtagtagaaaccgttgtcgataaccgggccgatcgccattttggtgtttggccacagctgcttaatagcatggcctaacaggtgcgcacaggagtgacgaatgatctccagaccttcttcgtctttcgcggtgatgatcgcaagcgttgcatcgctttcaatcagatcggacgcgtctaccagctcaccgtttacgcgacctgcgatggttgcttttgcaagtccaggaccgatatccagggcaacatccattgggctaacagcatggtcgaaatggcgttggctgccatcaggaagagtaattacaggcattttatatccttatttgcagtgatgccccacacataagagcatatacaaagaaaataatcgtgattaaacagtagattacgaaaccatctgaccaacaatcgtcaaattggttcgtcatcatgcacctgccgattcagataaatgcgaatttacggcaagcagggtaatggtaacactattgaaagggcgaatgcaccttctgagaccgtttgaaccgttcatccttttgtctgcgttcatgaacttttgctgacggaggctcgcaatccgaaagtgctgagctattcttgacttggtccttaaacatcgaaggggtatcacatgaatgtatccagcaaaaccgttgtgatattgaatctactttccgctgcttgcctggtattgattctggctgacagattccattggttttaagccgaaccggtgttccggcataacctgttgtccagggttgagcgctttctggcgcagattttggtagactaagggtatcaactgacaaggattaggttatgccaacaaaaagatttgccgtgaagcactggaaaatggtcgtggtgttaattgctatttgcggcgcgatgttgctgctgcgctgggccgcaatgatctggggctaatattttgtcagcgaaaacgtgctgtgaatttactgaataaatcttaactatctttacgataatttatggtccaaaaccggtacgtcataatccggttttcgacaggctgtgacagcgtatatattccgtcacacgtggcagttgaaatatcaggaccactcacccgccaccagcttgtgtacatcaaatgcatcattcattgactggccggtagactgagagccaggggcaatgttggagcctgcttctacatccgaggctttagcgatcccgattgggctgttaacgtcactggcaggttgcgtcatattatcagcagcaaatacgccaaatgaaagtgcggaaagcaccatcgctgctgtagcggttttgatttttttcataattttattctcatacttatttaatgcgatatgcctgaggcgagtttttcgcctgtgccgtaagtgtagatctggatcacattcttgcctagtcaaattatttatcaattcgtgtcaaataaactgaataagccctggccggctaattatggagaaattatgaagttgaaaccagacccattattttaaaacgccgtttaatataaataagcacagtttcagaaaataaaaaacgggccgagaataatcccggcccgacgatattacattttataacctaaagaaatcgtggttcggcgatcggtatgttccggtgctgaatcaggtggtgatgagttccaggttacgttgtacgccaccttgagtccaaagtgttcgttgatggccacgttcaacgcactttctgagttcagcgttgtatcttcagcaccaaacaccgacacaccctgggtgaattttgcgttgtccgtcatctgccatgcataggtgcccgatgcataacccagcggctgggtttcatcttcgccgttggtgtactcgtcgtaacggacacccggaccgaattcaaaacgcaggctgtgcaccggcccattgaggaactgacgaccataacccgcagtcacgacatcacgctggcgatagccgttgtagcggtcagtcagccaactcgcctgcccgaacaggtagtcataatcggtcatgttgtatcggctacgtccgcctaccgcgtatttctccgatgagcgttgatcgttagcagaggtgttgctggcatttccccacagcgaccaggccgtggtgttgccgtaccaggtcagggtgctgtctgcggtcagggaggagcttttcgtattaccggattgcgccaaatacccggcattcacgttaccttcaaagggttttttggcagtggagggatcgtccatgacagtaaaaacggtatcatcggcggttgcattcagtgacgcaaatacgccacccgccagcatcagtgctgcgggtactgtcttcaaaagcttcattttatttaaggagtccgtacaacataaaaagagaccgtcacggtctcggaaactttcttgcggatcaatgacaaggcgaccatagaaaggtaacaaattataaaaagccgcaaataacatagcaatattttcttctttcattttttgaataagaacgatcccaaaacgtgttttattttatatgcccggcgcaggttatttgtcagcattcatatttaaaatcatactgttatttacgttgccttcctgccaaacggtgccaggcttaaaagaacccatgataaaaggaggtcatgatggcttcgatttatacgctgacactctccccttccctcgactccgcgaccatgacgccgcaaatctacccggaaggtaagctgcgctgtagcgcgccggtgtttgagccgggcggcggcggcatcaacgtggcgcgcgctattacccatctcggcggaaaagccaccgccatcttccccgctggcggcgccacgggagagcatctggttgcgttgctggcagatgaacaggtggccgtagacaccgtcgatgctaaagactggacccggcagaacctgcatgtccatgttgaatccagcggcgagcaatatcgttttgtgatgccgggggcgaaattaagcgatgatgagtttcgtcaactggaagagaaagtgctgaccattgaaagcggctcattactggtgatcagcggtagcctgccgccgggcgtcaaaacagaaaaactgacggcgctggttcaggcggcgctccagcgcggcatccgctgcattgtcgatagctcgggcgaagccctgaaggcggcgttagaacccggacaacttgaactcgttaaacctaaccagaaagagctcagtgcgctggttaatcgagaactcagccagcctgatgacgttcgtactgccgcagaagagctggtacgtacgggcaaagcgcatcgcgttgtggtctctctcggtcctcagggtgcgctggccgtcgacaagacgggctttgtacaggttgtgccaccgccgatgaaaagccagagcaccgtgggtgccggtgacagtatggttggcgcgatggtgctgaagctggcgcagggcgcttcgcttctggagatggcacgctatggcgtcgcggcagggagtgcagccaccataaaccagggaacgcgtctgtgttcgcttgcggatacccagaaaattgtcgattacctggcgagaagctgaacctgcttccccttcccattgagggggaagtcgctaaacagggcatatcgactatgctaagaaaactttcaggataacaacgaggtgaattatgagcagtggtgatatcacccgctacgtcgtaaccgtgaatattcatgaggcgtcgctgaccgaacttaatgaactcaacaacgcgttcacgcgcgccaattttctgctcacgttgacggacgatgagggcaatattcacgatctcggctcactggcatttggcctgataagcccgctgagtcaggaagaggtgaaggcgctggccagtagtctggtggaaagcgtgactgacaaagccacggaaattgatgtggatagctgggaaaactggcataaaaaagaacaataagtgccctgtacaaaattaaaccgctcagttgtgcgttagttcctgtttttttatagccgttttgcgctaactttatgatctggcagacaacatgggagagacatcatgtggcaggctatcagtcatcttttaagtgagcagctgggtgaaggtgaaattgaactgcgtaacgaactgccaggcggagagatccatgccgcatggcatttacgttacgccgggcgcgatcttttcgttaaatgtgatgagcgtgaattgctccccatttttactgccgaagccgatcagcttgagttgttatcgcgcagtaaaacagtcaccgttccgcaggttttagccgtcggtagcgatcgtgactatagctttctggtgatgaactatctccccgcgcgccctctggatgcgcacaacgcctttattctcgggcaacagatcgcccgtttgcaccagtggagcgatcaacctcagttcgggctcgattttgataacgacctctccactaccccacagccaaacgcatggcagcgccgctggtcgacctttttcgccgagcagcgcatcggctggcagctggagctggccgctgaaaagggattagcgttcggcaacatcgacgcgattgttgaacacattcagcagcgtctggcttcgcatcagcctcaggcttcccttctgcacggagatttatggtcaaacaactgtgcacttgggcctgatggtccctatatatttgacccggcctgctactggggcgacagagaatgtgacctcgcaatgctgccgttgcaccctgaacagccgccgcaaatttatgatggctatcagtctgtctcgccgttacctgcgggtttccttgatcgtcagccggtttatcagctgtacaccttgataaaccgggctattttgtttggcgggagtcatctggtcaatgcccagcgggcgctggaccgcattctggcggcatagcgggagggggcggcttcacgccccttcccttaggatttacaggaagccaagcagcgtaaagaagaaatacccggccacaatgataatgaccggcaggatgtagagcgggaaaaactgcacaaaaatggtatgacgcggaacgacaatgcgcgattcgatctgctcgcggctcatcccgtcagggcctttcgccttctcaaggatcagctggtcttccaccccttcgcgcaaaaagcgggtctggcgactcatgcgcgcgccggaggcctgcaacgccatcgcgataaatatcaacgcatagattatccagaaaccgacattcagctggtggtgaaaatccggcgtgggcgagttgaaccagaagacgttcaggaacggggtgttaaaccgcatcatctcaatcatgacgtgcgcaaaatcaagcatgacggcattgatgcccggctgtttttcgctgtgatcgtacataaatttgagtacggagatcagcgttgaaatcagggcgggaatgaaaataacccaaccagcaatacgttttaagaccgcgatgcgtccagcttgttgatacgtcattagttcctcttcataaagacgcgttatttgtgcctaagtctacctgctgtcggtcattttcgcccgctctttgaatgcaatatgctaaattgcttgtgcttagcaccgtttgtcttacccccaagataaggagatgttgtaatgtcgaccccgcgccagatacttgccgctatttttgacatggatggattgctgattgattccgaacccctgtgggatcgggctgaactggacgtgatggccagcctcggcgtcgatatcagtcgtcgtaacgagcttcccgataccctggggctgcgcatcgatatggtggttgacctctggtatgcccaccagccatgggttggcccggatcgcgacgaagtaacggcgcgcattatcaaccgcgctatctccctcgtagaagagtataagccgctgttgccgggcgtacgcgacgctatcgccctgtgcaaggcgcaagggctgaaagtggggctggcctccgcctcaccgctgcatatgctggaaaaagtgctgacgatgttcgggctgcgcgacagcttcgacgcgctggcctcggccgaaaagcttccttacagcaagccacatccgcaggtatatatggactgcgccgcgaaactggggctggatccacttacctgtgtggcgctggaagattcggttaacggcatggtggcgtccaaagccgcacgtatgcgctccatcgttgtgccggctgaagaaggccgacacgatccccgttttgccctcgcggacgtcaggctgacgtctcttgaagaattgactgcccgccatctgcgcggggagtaacgctctttcaggcagcttcggctgcctgcctcgccaaatcaaaacaacgttttactttatttgcttttctcattccagactcctattcttacgtgcagaatgacaataacctgacttctgaggcgcgtatgatactggatgcttttactctggcaggaaaagtggcgatggtgaccgggtgcgataccggtctggggcaaggtatggccattgccctcgcccaggcaggatgcgatatcgtgggggttaaccgcaaggttcctgacgaaacggcagcgcgcgttacggcgctgggacgacgctttatcgcgattcgcgccgatcttggcaagcaggagagtattcagagcgtggtggataccgcagtcgctgagatgggccgcatcgatattctggttaacaatgccggcaccatccgccgtgccgatgcgctggaatttagcgagaaggactgggacgaggtcatcgatctcaatctgaaatcggtctttttcctctctcaggcagtggcgaaacagtttatcgcgcagggtcagggcggcaagattattaacattgcctccatgctctccttccagggcggcatccgggtgccctcctatacggcgtccaaaagcggcgtgctgggcctcacccgcctgctggcgaacgaatgggcaacgctgggcattaatgtgaatgctattgcgccgggttacatggcgaccaataacacccggcagcttcgcgatgatgagcagcgcagccaggcgatcctcgaccgtattccggcgggtcgctggggtctgccggaggatttacagggtccggtggtgttcctggcctcatcggcctctgattacgttaacggtcataccctcgccgtagacggtggctggctggcgcgctaaccttgcgtttgtgacaaagagttacaccgtcacctctttcacacactgtataaaaaccctatactgtatgaatcgacagtttaccgggttttatcatgacggcggaaggccacctgcttttttcacttgcctgtgcagtgtttgccaaaaacgctgaactgacccctgtgctggcacagggggactggtggcatattgtcccttccgccgtgctgacctgcctcctgccggacatagatcatccaaagtcattccttggacagcggctgaagtggatttcaaaacccatcgccagagcctttggtcatcgcgggtttacccacagcctgctggccgtatttggcctgcttacactcttctatttgaaggttccggagagctggatcgtcccggcggatgccattcagggcatggtgctcggctacttaagccatatcctcgccgatatgctgacgccagcgggcgtaccgctgctctggccctgccgctggcgtttccgtctgccaatcctcgtgccgcaaaaaggcaaccagctggagcgcgttctgtgtatggcgctgtttgcgtatgccgtgtggatgccgcagacattgcccgaaaatggtgcagtgcgctggtcatcgcaaatgatcaactcgctacaatttcagttcaatcgttttattaatcaccagattgaacattaaaccgacaatataatcacttttgtcataaaccattccatatggatataagcgcgatatcacacttctgataaccttgcgccaacaggttcggtaaaaaccgaccgtataataaatcaggagaacggggatgaattttccactcatcgcgaacattgttgtgttcgtcgtattgctattgcttctcgcccaggctcgccacaaacagtggagcctggcgaaaaaggtactggtcggtctggtcatgggcgtggtgtttggcctggccttacacgccatttacggctccgatagcccggtactgaaagattctattcagtggttcaacattgtcggtaacggctatgtacagctgctgcaaatgatcgttatgccgctggtattcgcctctattctgagcgccgtagcccgcctgcataatgcctctcaactgggtaaaatcagtttcctgaccattggtaccctgctcttcaccacgctgattgcggcgctggtgggtgtgctggtaaccaatctgtttggcctgactgctgaaggtctggtgcagggtagcgctgaaaccgcgcgtctgacggcgattgagaccaactacgtgggtaaagtggccgatctgaccgttccgcagatggtgctctccttcattccgaagaacccgttcgctgacctgaccggtgcaagcccaacctccattatcagcgtggtgatcttcgcggcattcctgggcgtggctgcgctcaagctgctgaaggacgatgcgccgaaaggcgagcgcgttctgacggccatcgataccctgcaaagctgggtgatgaagctggtgcgtctggtcatgcagctgacgccgtacggtgtcctggcgctgatgaccaaagtcgtggcaggctctaacctgcaagacatcatcaagcttggcagctttgtgatcgcctcttatctggggctgggcattatgtttgtggtgcacggtatcctgctgggcgtgaacggcgttagcccgctgaaatatttccgcaaagtctggccggtgctgaccttcgccttcaccagccgttccagcgcggcatccatcccgctgaacgtggaagcacagacccgtcgtctgggcgtaccggagtctatcgccagcttctcggcctcctttggcgccaccatcgggcagaacggctgtgcgggtctctacccggcgatgctggccgtgatggttgccccaaccgtggggattaacccgctggatccggtctggattgcgacgctggtgggtatcgtgaccattagctccgccggtgttgcgggcgtgggcggcggcgcgaccttcgctgcgctgatcgttctgcctgcgctgggactgccggtgacgctggttgccctgctgatctctgttgaaccgctgatcgatatggggcgtaccgccctgaacgtgagtggctcaatgaccgccggtaccctgaccagccagtggctgaagcagaccgacaaaacgattctcgacagtgaagaagatgcggaactggcccatcgttaatcacggctgaaataaaaaaaccgcctgcgggcggtttttttatggctgttattcttcaacctcttcatcctggcgggtctgcacagcccatcgctgcgccgattccggcaccgtaaacgcaggggagcgacggaagtgctcgccaatcagcacgaaggcaacgtatttaccccgtaacatccagacatcgcgaaaaccatccactttcagggcatggtcaggcggcgcgggttcaacgcggggcacatagctaataacctggcggttttgttgacgaagaggtttcataagcgacgggttcactaaagcaaattcttaaagcaggaaatttctatcatagccgattctccccccacccgtcgcgcctgacgtgaggcagatggctcctttcgctaatcacttatctgaaaacgcttagttcgcctgctaattcatcacattgttctatccttaatagggttttcaggaacgaacaaaggagaatcgtgcaatgtcgaacaatgataaaccacatcaagcccctattcatggcaccgaagaatctcaaccgggaatggactcactcgcccctgcggatggctctcataaaccgtcgccgggcctgtccgcgccgggcgagcaacctactgcaccgggaagcgtgaagtcgcccgatacggataacgagaagttaaaatctctcgacccgcaccgcaaagggggtgaaggctatgcgctgaccaccaatcagggcgtgcgtatcgccgatgaccagaactccctgcgcgccggaacgcgcggcccgacgctgctggaagatttcatcctgcgggaaaaaatcacccatttcgaccatgagcgtattcctgagcgtatcgttcacgctcgcggctccgcggcgcacggctatttccagccgtacaagagcctgaaggcgatcacgaaggcggatttcctttccgatccgaacaaaatcacaccggtatttgtgcgcttctctaccgtacagggcggcgcgggttcggccgatacggtgcgtgatatccgcggcttcgccaccaaattctataccgaagagggcattttcgacctcgtcgggaataacaccccggttttcttcattcaggatgcgcataaattccctgactttgtccatgcggtaaaaccagagccacactgggccataccgcagggacaaagtgcgcatgacaccttctgggactacgtctccctgcaaccggaaacccttcacaatgtgatgtgggcgatgtctgaccgggggatcccacgcagctatcgcaccatggaagggtttggtattcataccttccgtctgattaacgctgaaggtaaagcgacgtttgtgcgtttccactggaaaccggtcgcggggaaagcatccctggtgtgggatgaagcacagaagctgaccgggcgcgatccggacttccaccgtcgcgaactgtgggaatccattgaagccggtgatttcccggaatacgagctggggttacagctgatcccggaagaggacgagttcaaattcgacttcgacctgctcgacccgaccaagcttattcctgaagagctggtgccggttcagctggtgggcaaaatggtgcttaaccgcaacccggataacttcttcgcggagaatgagcaggctgcgttccacccgggccatattgtgccggggctggatttcaccaacgatccgctgctacagggccgtctgttctcttacaccgatacgcagatcagccgtctcggtggaccgaacttccacgaaattcctatcaaccgtccgacctgcccgtaccataacttccagcgtgacgggatgcatcgccaggatatcgataccaacccggcgaactacgagccaaactccattaacgataactggccgcgtgaaaccccgccggggccaaaacgtggcggatttgagtcgtatcaggagcgcgtggacggaacaaaaattcgcgagcgcagcccgtcattcggcgaatattacgctcagcctcgcctgttctggaacagccagaccccgattgaacagcagcacattatcggcggtttcagctttgagctgagcaaagtggtgcgtacctacattcgcgagcgcgtggtcgaccatctggcgcatattgatatccagcttgctcagggcgtggcgaataatctcggcatcacgctgactgacgagcaatgccatgccgcaccgccaaaagacgtgaacgggctgaagaaggatccgtccctgagcctgtacgcggtacctggcgggtcaattaaaggccgcgtagtggctatcctgctgaatgataaaccgcgcgccagcgacgtgctggggatcatgaaggcgctcaaaacccagggcgtacatgccaaactgctttactcccgcatgggtgaagtgacagccgacgatggctctgtcctgccaattgccgcgaccttcgccggggcaccgtcgctgacggttgacgcggtgattatgccgtgcggcgacgttgagagcctgctcggtaacggtgatgccgcctattatctgctggaagcctataagcacctgaagccaatcgccctggcaggcgatgcgcggaagtttaaatctctgctgaaggtaccggatcaaggggaagaaggcattgtcgaaggtgataacattgacgatgcgtttatgacccggttgtttgacctgcttgccgcccaccgcgtgtggtcgcgcagcagtaagattgaccagataccggcgtaaaaaaaagccgggtggcgctgcgcttacccggcctacatttcgattgcttttgtaggcccggtaaggcgaagccgccaccgggctttatcttaaagatccgcgaaagttcccaaccgatatccacgctcggcaatcgcgtacttcaacgacgccgacgtcagcacatccagttccgccagacgcggccagcagtaggcgctcttacgtacgatgttatcgacaaacgccgggtgcgccattacctcaagcgagcgctccccttttgcggcggactcatccagcaccttcaggaacagcgcttcgtcgatctcgtcgccataaaatgcgctgctgaacgcctccgttgacgtcaccgcgacgtccggcagcccgcgcacctcacgatccatgcgcatcgccacgcctctacgttgcgcaaactctgccacaagcgggaaaatcgccgggatcatatgcacatgatgatggctgtcaatatgggtaggctcgcggccaaacacatccacaaagcggttaaactggcaatccagctcgcgggcaatctcatcgagcggcagagcgtcctgctccgccatttcccaaatccatttccccagctggccgtcgcgcgtcaggcccggcattggcgaaaggggcaacccaagcgtcagcacaaagtgcatgcccacgcccagctcgggcagctcacggcttaactgcgccgcatgttccaccgcctcaccgttgatgagcgctgttgtagaggtcacgacgccccggcgacaggcttcaataatgccgtagttctgcccttttgacaggccaaaatcatcggcattgacgatcagcaggttttccatcgcgcctcctcttaacggtgtgtgagtttcagtttctcaaccgttgcagcaaagtttggcagccatttttcatgcgccaggatcatctcacccgcgagtttttcagcgtcacggtcagaatgcaccagcgggctgaggttcagcgccagcagcacgtcattcagttcgccgctcagggccgcattgctcgccgctacttcaaagcctttgatggtgtgaatcaggcccatcaccttatcgtcgaagtgggtaatgcggggatgtggttttgcaccctcgcgcccaagaatgcaggtcatctcaacggcccagtctgccgggatattgtcgatgtgcccatgatggggaacgttcacatagtgctcggcctgcttgtcattgtaaatggcgttaatcacttcacacgcggcatccgaatagtatgccccgccgcgctgctccagctctttcggtttgacgttcaggttcggatctctatacaaatcaaaaagctgcttctctactttctgtacaacctgagcgcgtgcgccacctttgtagtattcgcccatttcaatggccagcatctctttctgcttgaagtagtagagcagatacgagcacggcagcagattcagggagcggatcagcccttcgctgaacggcagatcgaaaatgtttttcaccgaggccgcggtcaggcgaccagaggcgacgccgtcgagcagttccgcaaagcgcgattgcccgttcactatcacatctttgataaagaccatgtgattcaggccgaacagatcaatggagagatcatcgttatcggtcagttccagtacatcgcggatgaacatcttcatgccaatcggaatattgcagacgccgataaagcgtttgaaaccggtgtggcgatagactgcctcggtgaccatcccggccgggttggtaaagttgatcacccaggcgttcgggcagatctcctccacgtctttaatgatgtcaaaaatgaccggaatagtacgcaggcctttaaacaggccacctgccccgttggtttcctggcccagataaccgtggctcagcggaatgcgctcgtccagctcacgcgccttcagctggccgacgcgcagctgcgtggtcacgaagtcagcatctttcagtgccaggcggcgatccagcgttttatgcacggttaagggcacgcccgctttttcaaccatgcgtttgcacagttcaaaaataatattcagcttctcctgaccttcttcaacatccaccagccataattcgctgaccggtaattcatgataccgtttcaggaaaccttcaagtaattccggggtatagctgctgccgccaccaatggttacgacttttaatttctgttgcataatatctcccttagcgtatcaggttaatcgcctgcaaggtatagcgtactcttcccgctatttgggcaagccattacgtcactgttcctggcggataaaccgccgaaagttaattaattaccgttaaatttttgcggtaactgttcggtgtgaatgaagtcaattttttaaaggttttaataaacaggctggggctgctgtaacccgattcgtaagcgatatcggtgacagagtagttagtaatttccagctgttttttggcaaagttaatgcggatttcattaatgatttgcacaggcgttttacggtaataacgctgcgtggcgcgcgtcaaatattcctgcgatttacccgacagcgccaccatattctccagggcgttatcgctgaactgtcctttatcgtacatcagctccacggtactgcgcagccactgaggaatatcatccaccacctgctgttcttcacggtgatggcggaggcgattcatgacgtagaacgtcacggtttcaataaattcatcaaattcattgtcgcggaaattcagcgaggcgataaccgtttcaatccaggtcataaactcatttttaacgcgatacacctgtgacgccacaaagcagaacggcaccagcggcagatagtgcttctcgaagaaacgcctgctcacccctacgttcagaatgcgtgtcgcaccaaactcataaaagctctggtgataagatcccattggcaggaagacgaaatcgccacgctcaagcaggacgcgcttaccgttgatctcctgatagtagcggccggtcagaacaatcgtgaactcgtagtagtcatgctggtgcagaccgctggcgctctccgttttgttgtaaatcaccacgtgaaaatttttgccattaaacagctgttgctcatgtgcggttttgatttccatcgtgctgacctcctgctacttcaactgacttattgcatcttctcgtgaagctcgatgagctccgcgaccagctcgcgtgccagcatggaggtcatcagatgatcctgcgcatgtaccagcaccagactcactttcatcttcccttcgccctggtcgctttcgatgagcttcgtctgcaccagatgcgcttcgtttaacgctgtacgggactgctccatcatggttttcgcggcaacgaagtcgccctgcttagcctgcttaagcgccgcatacgccaggctgcgtgcctgcccggagttgatgatgaggcccatcaccacctcttccagatcgttctctgcggtttcttcggcaacgatactctctaaatctaacatctttaagctcctttccgctggcgcgagttgccccgcgccgtgcaattttagaatttcagtgcgagggcgatatcctcttcgctctcttcttcatcgataaccgttgcggccttgttcgcaatcgccacgaacggcatgtagagcagggttgcaatcccgaggttgaatatcgccagcaggaaggccgccacgctaccgttggtgttgaagaacgcgcccagaccagccggcatcgtccacggcgcaatgttggtcaccggcgggataatgcccaggtagtacgccgtcagcgtaatcgcggccagcagcggctgaaccaggatgaagggaatgaacatcaccgggttcatgataattggcagaccaaacaggatcggctcgttaatctggaagatgcctgacggcagggccagcttcgcaacctgacgatggtcggcgcggcgagagacaataaagaccgcgatgatcagacccaacgtcgccccggtaccgcccaggaagatataggagtcaagcatcggcttcgcccacacatggaaggttttaccggccgccagcgccgcatcgacggagccgtactgctggtaaagcgcgacgttttccagtgcccatggggtcataataccgctgtccagcgccgccagtgccagtgaaccatgcacgccgaagaaccacagcagggaggtaaagatgacatacgcccaaccgaccacgctacccatcgacgccagcggcgttgagatagagtccataatgatctggtggaagtttgtgccccagtgagagagcgcccaggcaataatccccatgatggagagaataatgaagcccggaatcaacgcggaaaatgaacgagaaacggaggccggaacgctatccggcaagcggataacccagttacggcgaataatgaaggtgaacatttcggccaccaccagcccgataataataccggaaatgatgtttgccccacccagccagttggcgccaacggcgtaagcgtcacccacgctgtacggtgtgacggtcatgaacgcggcaatggacagtaagcctgccgccagcggatccactttacgctcttccgccagcgccattccgataaagaaaggcgccattagcgacataatacccaacgtaccgttgtatacgttgccgccaatggcttttaaaccattaagggtttcaatagttgaagcatctaacctaattcctaatgaataaaaaaaggaaccttctccaaagctcagaaaaacgttgttaattaaaacgaacattgccccggctaatgtcaacggcattaatttaataaagccgttcttaatggcattaacgtgaggctgctttcctattttaacagcaaaaggaaggagtaccttttcaagtgaagcgatgactttactcataggaaaatacccttaaatgccgcaacgaccgttacggcgtattgtgtgtgaaataactctttgacgggaaaaataaaaaattaattagcagcttttttaatcgccgcaacggcagcttttaatacacctaaaccatcaatcttgccgtataaaacggaatcgatcacttcgaccggcttattgggtagcagacgctgaatttctggcagcatataagcgatttgcggcccgagtaaaataacgtcggctgtctgacccttctcgcccgccagcgtttccggaaacgcctcaatcaccacagggacttcatatttttcggcctgcgcgcgcattttggaaaccagcagcgaagtggacatgcccgcagagcaaaacagatagatatgtttcttttccatgataacttccctcttgtttggctacccgccgtctcgctatcactcgactcgctatcctggctgacgggcagtgtgctgaacattgtttgtcgttgaagtgagtatacgcaatggtacagggaggggataattctggatagactgaaattgtctctcattgacctggcttgttgactaccttcacatttcaggcaaataattcgcgccaagaaataagattcacgtatgcataaaaaaaccggccttccggccggttgttaacgctctcaggcaagcaggcttactgtgccttaggtgcctgtgggtcggtgtcgtattcggcacaggtctggtaaccagaattgatcacgtgacccgtannnnnnnnnnnnnnnnnnnnnnnnnnnnnnnnnnnnnnnnnnnnnnnnnnnnnnnnnnnnnnnnnnnnnnnnnnnnnnnnnnnnnnnnnnnnnnnnnnnnnnnnnnnnnnnnnnnnnnnnnnnnnnnnnnnnnnnnnnnnnnnnnnnnnnnnnnnnnnnnnnnnnnnnnnnnnnnnnnnnnnnnnnnnnnnnnnnnnnnnnnnnnnnnnnnnnnnnnnnnnnnnnnnnnnnnnnnnnnnnnnnnnnnnnnnnnnnnnnnnnnnnnnnnnnnnnnnnnnnnnnnnnnnnnnnnnnnnnnnnnnnnnnnnnnnnnnnnnnnnnnnnnnnnnnnnnnnnnnnnnnnnnnnnnnnnnnnnnnnnnnnnnnnnnnnnnnnnnnnnnnnnnnnnnnnnnnnnnnnnnnnnnnnnnnnnnnnnnnnnnnnnnnnnnnnnnnnnnnnnnnnnnnnnnnnnnnnnnnnnnnnnnnnnnnnnnnnnnnnnnnnnnnnnnnnnnnnnnnnnnnnnnnnnnnnnnnnnnnnnnnnnnnnnnnnnnnnnnnnnnnnnnnnnnnnnnnnnnnnnnnnnnnnnnnnnnnnnnnnnnnnnnnnnnnnnnnnnnnnnnnnnnnnnnnnnnnnnnnnnnnnnnnnnnnnnnnnnnnnnnnnnnnnnnnnnnnnnnnnnnnnnnnnnnnnnnnnnnnnnnnnnnnnnnnnnnnnnnnnnnnnnnnnnnnnnnnnnnnnnnnnnnnnnnnnnnnnnnnnnnnnnnnnnnnnnnnnnnnnnnnnnnnnnnnnnnnnnnnnnnnnnnnnnnnnnnnnnnnnnnnnnnnnnnnnnnnnnnnnnnnnnnnnnnnnnnnnnnnnnnnnnnnnnnnnnnnnnnnnnnnnnnnnnnnnnnnnnnnnnnnnnnnnnnnnnnnnnnnnnnnnnnnnnnnnnnnnnnnnnnnnnnnnnnnnnnnnnnnnnnnnnnnnnnnnnnnnnnnnnnnnnnnnnnnnnnnnnnnnnnnnnnnnnnnnnnnnnnnnnnnnnnnnnnnnnnnnnnnnnnnnnnnnnnnnnnnnnnnnnnnnnnnnnnnnnnnnnnnnnnnnnnnnnnnnnnnnnnnnnnnnnnnnnnnnnnnnnnnnnnnnnnnnnnnnnnnnnnnnnnnnnnnnnnnnnnnnnnnnnnnnnnnnnnnnnnnnnnnnnnnnnnnnnnnnnnnnnnnnnnnnnnnnnnnnnnnnnnnnnnnnnnnnnnnnnnnnnnnnnnnnnnnnnnnnnnnnnnnnnnnnnnnnnnnnnnnnnnnnnnnnnnnnnnnnnnnnnnnngtttgatgatttctggaaaaagtaaaagcaaaacggtaactccgctttgcaggccgggtaaggcgtagccgccacccggctcttttttaaccaccaaacacctgctacactgtatgcctgaacagtatatggagcagtatgtgagcaggcgtcaatccgccccgcgtcttgagtttgaagcggcggctatctacgaatatcccgagcatcttcgcccctggcttgaggcactgcctaaacagcctggcgtctatttcttccacggcgacagcgacaccatgccgctctatatcggcaaaagcgtgaatatccgcagccgggtgatgtcgcacctgcgtacgccggatgaagcatcgatgctcaggcagtcccggcggatcacctggatcgagacggcaggcgaactgggcgcgcttctgctcgaagcccggctcatcaaggaacagcagccgctgtttaacaaacgcctgcgccgcaaccgccagctgtgttccttgcagattaacgcaggaaaaccgcagatcgtttatgcccgggaagtggatttttcgcatgaacccaatctttacggtctgtttgccaacaaacgtgccgcactgcaaaccctgcaatccctggctgatgaattacagctttgttacggcctgttaggactggaagccaccacccgtggtcgcgcctgtttccgctcagcgctgaaacgctgcgccggggcgtgctgtggaaaagagagcgttgaagaacatcatgcccggtttatggctggccttgcctctatcagcgttaactgctggccgtgggaaggcgcggtggcgctgaaagaaacccgcgatgggatgacgcactatcacatcatccgcaactggctctggcttggcgccgttgaaaatctggatgacgctaccgctctgctgcgcacccctgccggtttcgatcaggatggttacaaaattctctgcaagccactgttaaccggaaaatatgagatcatcgtcctcaatgacccggcagccaggtaatttcactgaacagcagcgaccccttcgtttccagtaaacggagggtatgactgcccgcttcccagctggcgccctgatcggcggtcagtaatttgtcgcccagttgccaggcgccgcttaatacgaatgccaccccaccgcgtgatgcgaaggtagtgaacgtccgggtagcaacgcgcacctttgcctggcagcaatcccgtcgggtcatgatgttgaagtccatcgacatctgcccctctgtgagcacggctttcaccgccagatcgcccgcaaatcggtaaggctgatgatgcttcagggtatgacaaaacgccctgcctgcatccagggtcacctcgccgccctccagcagcgtaatcacccgttcaacgcccgggaacgcggaaaattcgccgttactggcgatggaggcaatactggcccgccagaaaaaatcccgcgtcgcgggaggaaaacagcaaatctcacgcgtctcacccgcaccattacgccagagactgaccggcattttacggatatcaaagaattccatgaccactcctgaaggacgcaccgtgcgccagggcattttcacagacgtattatcggcagcagtcaggccagaccttaggcatgggataaaagaaaaaccgccggtcctgtccacagcgttttcgcttttgtagacaggagcccggcggtcttaagagagtgaaccgattattcggttggtgcaggcattttaccttccggcgctgcacgttctgtcagacgcttctcaaaattggcattaaattgctttttctgttccggcgtcagaatgttgtaaatcttgttctgggtttccatgtgggccagcatgcgcgctttatgctgctcggccattttgtcgatctgcgcttccgcttttgctttatcgaagctgtcgctggcaatgatgtcatgcattgcgcggcgctcttccagcggaggacgtttcatctggtcacgctggcttttcatgatgtcgcggatctgctgcttctgcgcatcggtgaggttcagatctttaaacatcatcatctcatggtgcatacccggcttgcctttatgatgcatcatcattttgccttccgtcggcgcggcggtagtggtcgcggtatcggcggcgaacgccatgctggtagcgcccagagccagggtagaggcaacaaacagtgcagttaatttacgcataatgtctttccttactttcagttattcttcggcgctatgccgtgttgacgagattaactttacgggtttagtcgtcaattagtcagagcaacggtaaaacnnnnnnnnnnnnnnnnnnnnnnnnnnnnnnnnnnnnnnnnnnnnnnnnnnnnnnnnnnnnnnnnnnnnnnnnnnnnnnnnnnnnnnnnnnnnnnnnnnnnnnnnnnnnnnnnnnnnnnnnnnnnnnnnnnnnnnnnnnnnnnnnnnnnnnnnnnnnnnnnnnnnnnnnnnnnnnnnnnnnnnnnnnnnnnnnnnnnnnnnnnnnnnnnnnnnnnnnnnnnnnnnnnnnnnnnnnnnnnnnnnnnnnnnnnnnnnnnnnnnnnnnnnnnnnnnnnnnnnnnnnnnnnnnnnnnnnnnnnnnnnnnnnnnnnnnnnnnnnnnnnnnnnnnnnnnnnnnnnnnnnnnnnnnnnnnnnnnnnnnnnnnnnnnnnnnnnnnnnnnnnnnnnnnnnnnnnnnnnnnnnnnnnnnnnnnnnnnnnnnnnnnnnnnnnnnnnnnaagtagtaaaaaaacaacttttcgccaattgtggagaaattaaggaaaaagcgtggagagatgaaacagaaatattcaacaggatgattttaaagagattatggagaagtatagcgaagtgccgtttaataataaagcaattccccaggaatattccgcaaacaataccagagcgcttttaacgctaagaaatttattcttcatttcccctccggtctgcgcgaggggagacgatcagggcattttttccagcatcaggccagctcgcaaaccaaacgcgaccaacggattaggaaataaaacatattccgtggatttctgtaccgcatagcgcgtctcaccatcttccgccagcaggacgccatggcgaaacggcgtaaagttcagcgtatggggcgccatatgtagctggaaagcctcgctttgacgcgtgatctgctgcacgacccgatagcgcacaacgggttcccgggagggttccggcgcaaccccggcgagcaacgcccgaagcgcctgatgcgtaggggcaaaacgcgtcaggtcgttttgcccgaacggcagcgcttttcccagctccagggtgcaggataacgcgccaacattctcgcaggtgaagtgggtaaacgtgccgcctggcgtctggtggaaaaccagcgcctccagccccgcgtcgccaagccaggtcagaaacgcctcatcccacggctgatgacgctgcggtaacacgccaaaacgcacgtggtacgaggcgcgaatggccgtatgcagatcgaggtgccagcgcgtttcccccgccccggcaaaaaacgccgtgaccaccttctccagccattgcgcgcgtgtcgtctcatcactctgtggaaactgcgcccagcgaccaccaaacatgcggttgatgtcgctcacgagataccgtttgttttgcgccagcgcaggcggatttcccagcaccaccagcagacggcagtgcagcgtgatctctgcgcgaaacagcgcgcgcagcaaaagatcgacaatctccacgggcgcggtttcgtttccgtgaatgccggtcgaaagcagcagcgacaggtcatattcccccgtcggcgtcagttcaagcacgcccggccccagccatcgccagtggaacgaggggccttccccctcttgccgctccggtgtctcttcggccagcgtcagcgccagtaagttttccatatcatctccttagcgctggaacggataaaccgatcccagttgcaggatggtcgataatgcatccagcgcctcgcggccttcgcgcagcagctgcggatcaaccagatcggcctgaaccagacggtcgcgataatagcggtccacccagtcattgagggtattgaacagcgtgtcgttcatcatcaccgccggattcacggcctgcatctcctccggcgttaacaccacgcgcagtcgcaggcacgccggtcccccgccgttggccatactttcccgcagatcaaacacgcgcagttcatcaatcgggttatccgcctgcaccagttcgctcagatagcgccagacgccctgatggttgcgggactcctgcggcagcaccagcatcatgctgccatcatcccggctcagcagctggctgttgaacagatacgtttcgaccgcatcctgcacgcttaccgcctgcgtgggcacctgaatcggcataaatcccggcacgcgttcgcgcagcgtggccagcaacttttcctgatgggcaaacgcctgctcgtggcagaacagcacctgacggttggaaacggcaatgacgtcgttatgaaacacgccctggtcgatcacctgcggattttgctgggcaaaaatcacctgagaaggattaacctggttcagccgcgcaaccgcctggcttgcggctaaagtttgtctcgccggataacgaaccggtgcggcatggccgccctcttcccgtccatagataaacagctgcaaacccggctcgccatagtcgccgcccagacggttgtggtttgccgccccttcatcgccaaacatcgcgacctgcggcagcgccgaatgtacctcgaaatgcgcttcatgattaaaaatggcgcgcagcacgcgcccggtggtcttcgcttcgctggcgcggtggaatttgttgttcaggttagcaacggtcagatgcactttgccgtccagcgtatccgccgacggcgcaacggtnnnnnnnnnnnnnnnnnnnnnnnnnnnnnnnnnnnnnnnnnnnnnnnnnnnnnnnnnnnnnnnnnnnnnnnnnnnnnnnnnnnnnnnnnnnnnnnnnnnnnnnnnnnnnnnnnnnnnnnnnnnnnnnnnnnnnnnnnnnnnnnnnnnnnnnnnnnnnnnnnnnnnnnnnnnnnnnnnnnnnnnnnnnnnnnnnnnnnnnnnnnnnnnnnnnnnnnnnnnnnnnnnnnnnnnnnnnnnnnnnnnnnnnnnnnnnnnnnnnnnnnnnnnnnnnnnnnnnnnnnnnnnnnnnnnnnnnnnnnnnnnnnnnnnnnnnnnnnnnnnnnnnnnnnnnnnnnnnnnnnnnnnnnnnnnnnnnnnnnnnnnnnnnnnnnnnnnnnnnnnnnnnnnnnnnnnnnnnnnnnnnnnnnnnnnnnnnnnnnnnnnnnnnnnnnnnnnnnnnnnnnnnnnnnnnnnnnnnnnnnnnnnnnnnnnnnnnnnnnnnnnnnnnnnnnnnnnnnnnnnnnnnnnnnnnnnnnnnnnnnnnnnnnnnnnnnnnnnnnnnnnnnnnnnnnnnnnnnnnnnnnnnnnnnnnnnnnnnnnnnnnnnnnnnnnnnnnnnnnnnnnnnnnnnnnnnnnnnnnnnnnnnnnnnnnnnnnnnnnnnnnnnnnnnnnnnnnnnnnnnnnnnnnnnnnnnnnnnnnnnnnnnnnnnnnnnnnnnnnnnnnnnnnnnnnnnnnnnnnnnnnnnnnnnnnnnnnnnnnnnnnnnnnnnnnnnnnnnnnnnnnnnnnnnnnnnnnnnnnnnnnnnnnnnnnnnnnnnnnnnnnnnnnnnnnnnnnnnnnnnnnnnnnnnnnnatcgtcatagcgccagacgcacagcagcgggccaaagacctcttcatccggcacgttgctcgtcgcactcatctcaataatccccggcgtcagcagcgacgtgcccggctgaaccagcttcggctccagcagggttttcgccccgcgcgccacgtgctcctgccacgctttcagcacgttcagcgccgcctgcgcggagatcagcccgccgataaacggctgcggctcggcatcccatttcacgggaaccagacgcgcgctcacctccaccagacgcttcaggaacgcatccccctgcgcgccgcgtttaaccagcaggcggcgggcgcaggtacagcgctgtccggcggtaatgaacgccgactgaatggtcagatggaccgcggcatcgatatcatccggatcttccacaatcagcgggttgttgccgcccatctccagcgccagaattttttccggctgccccgccagctgacgatgcagctgatagcccgttccggcactgccggtgaacagcagaccgtcaatgtcgctcagcgcactcagcgcctgacctgtttcacgcccgccctgcaccagattcaccacccccggcggcagccccgcctgctcccagagttttatgactgcttctccggttaagggggttaactcactcggcttgaagatgacggtattccccgccagcagcgcaggcacaatgtgcccgttcggcagatgtccggggaagttatacgggccaaacaccgccagcaccccgtgcggacggtggcgcagcgtggcggcgccgtctggcatctcggtatgctgctcgccggtgcgggtatggtacgccttcaccgatatcgcaattttgttgatcatcgccgtgacttcggttgttgcctcccagcgcggcttgctggtttcgcaggcaatgatgcgggtcagctcggctttattggcctccagcagcgcagcaaatttctcaaccagcgcctggcgctcggagaatggccgtttcgcccatgccggaaacgcgcggcgtgcagcctggcaggcctgctcaacctgcccggcgctggcgtcgttccccgaccagagcacctcctgaccgaccgggttagtttttgtccgcgcgtcaccttcgcccgttacccagtcaccgttaatccatagagtcatgctgttttctcctcagggcagagccgcaccaggcgaaccgtgtcgccagcgttacatttcagggcatccagttgcgcagccgtcagtaccagacgctcgcatgttgggttggttcgcaccagcatggcgcggaagttggtgtaattctcgttcgagaccaggcaggctggccactcgcccggcgcgggctggccttctgaaacctcaaccaggcggcttttacggatggcgcgaacgcggtcaatgtcgcattccagcgtcgggccgccgtcgaagatgtcgacgtagttacggtagcgaaatccctctttctccagcactgcgcgggccggggcggtttgcgggtgaacttcgccgatcaccgcctgcgcttcaggcgttaagaaatgggtataaataggatgcttcggcatcagctcggcgataaacgccttctgaccggtcccgcacaggtaatccgcccggctaaattccatggagaagaagcgttcgcccagactctcccagaacggcgagtagcccgtctcatcaatcacgccgcgcatctccgcgaccactttttcgttgaagcggtcgcgaaaggcggccataaacataaagcgcgatttggagagcagataaccgttgccctctttgcgccagtccggatcgagaaacagggtgcagagttcgctggcgccggtatggtcattacagaggaagagcgtcggcagcgcgttgtaaacgttcagctctttcgaggcgtggaccatcgtgccgacgcggtagttgtaccacggatcgttaagcccgacggccacctcgatagcgcaaatccccgccacggttcccgtgtcagtatcttccagcacgaacacatagccctgttcgctttttggcaacgtcccctgccaggtttgcagggcgcgctcaatgcgcgccgacagcgttttttcatcggcaggcagcgaggtcagcccgccccctgtcttaccggcaagctgcataagcccggcgagatcgccgtgcgcaacgggacggatgaccatcatgatgacaccccggacttcacctgttcgcaggccagcgcaaaacgatctaagccagttctgacctcttcctcgctgacgatcagcgcaggggcaaaccgcaccacgttagcaccggcaatcagcaccattacgccctgctttgccgcttcctgtgaaatcagcttcgnnnnnnnnnnnnnnnnnnnnnnnnnnnnnnnnnnnnnnnnnnnnnnnnnnnnnnnnnnnnnnnnnnnnnnnnnnnnnnnnnnnnnnnnnnnnnnnnnnnnnnnnnnnnnnnnnnnnnnnnnnnnnnnnnnnnnnnnnnnnnnnnnnnnnnnnnnnnnnnnnnnnnnnnnnnnnnnnnnnnnnnnnnnnnnnnnnnnnnnnnnnnnnnnnnnnnnnnnnnnnnnnnnnnnnnnnnnnnnnnnnnnnnnnnnnnnnnnnnnnnnnnnnnnnnnnnnnnnactggtgacgctgcttcacgccgttaagcacctcaggggtgttgatgatatccagcacctgtccggcgacagcggttgccagcgggttgccgccgtatgtggtgccatgggtgcccacggtcatcacgctggcgaatttatcggtggtcagcatcgcccccaccgggaaaccgccgccgagcgctttggctgttgagagcacatccggggtcacgccatagtgcatgtaggcgtacagctcacccgtgcggcccacgccggtctggacttcgtcaaaaatcaggaccgcgttatgccgatcgcacagctcgcgcagcccttgcaggaacgctttctgggcgggcatgacgccgccttccccctgcatgggctcgacaatcaccgcacaggtggtgtcgtcaatcagctcgctggcagagtgtaaatcgttatacgccgcatgccggatatccggcggcagcggcgcaaaatcctgagaatatgagggctgaccacccgcactgacggtaaacagcgtgcggccatggaaagcatttttaaaggctacgatgccgctcttgtgcgcgccgaatttatcgtgcgcatatttgcgcgccagcttcagcgccgcttcgttcgcttccgcgccggagttacagaaaaagactttgtctgcgaaggtggcgtcgatcagcttcttcgccagacgcaatgccggttcgttggtataaccgttgccggtatgccagaatttcgccgcctggtcattcagcgcctgccgcagcgccgggtttgcatgccccagcgcattcaccgcaatcccacccgcaaagtcgatatactctttgccctgctgatcccacaggcgagagccttccccacgtaccggaataaaagccgccggagcgtataccggcatcatccattcatcgaaattttcacgcgtaactgacagagacatagcgacctcatccggtaaataaaaggttgtttaaatgttaaataattgagtgtttgcactgtgaatgtagattgcagcgttcgtgccagccagcgataaaaatgcataaacgggttgaggtaacagaatatcaatgagttacaatatggagttattcactgttaatgcataaatagtgaatatttttacggcaagcggcgctttgccgcatgaaaacaagaaagagtatgcagaggccaaatataattctggaattgtgatcgctcgcgaaatttatcggtcctttatgccctgttcgagggcaaaacgcgccgaaatggtgcaaatattgcaccgtcggcattatctgtcgcagtaattgggcgaagcggataacagacgacgtaaattctgctaccatccttgcactattcaccttgcattggcagcgactatgaaatttgtctcttttaatatcaacggcctgcgtgcccgccctcaccagcttgaagcgattgttgagcaacatcagccagatgtgatcggcttgcaggagacaaaagttcacgacgatatgttcccgctcgaagaggtagcgaagctgggctataacgttttttaccacggtcagaaaggccactacggcgttgcgctgctgaccaaagatacgccggtgtcggtgcgtcgtggcttcccgggtgacgatgaagaggcgcaacgccgcatcatcatggcggaaattccttccgcgctcggcaatgtgaccgtcatcaacggctatttcccgcagggtgaaagccgcgatcatgaaaccaaattcccggccaaagcgaagttttatcaggatctgcaaaactacctgacaaccgaactcaaaaaagaaaacccggtgctgatcatgggcgacatgaatatcagcccgacggatctggatatcggtattggcgaagagaaccgtaagcgctggctgcgcaccggcaaatgctctttcctgccggaggagcgcgagtggatggagcgcctgctgggttgggggctggtggatactttccgcacggctaacccggcgacgcaggatcgcttctcgtggtttgactatcgctctaaaggcttcgatgacaaccggggcctgcgtattgatctgctgctggcgagcgcccccctggccgaacgctgcatcgaaaccggtatcgactatgatatccgcagcatggaaaaaccgtccgaccatgcgccggtatgggcaacgttcaagctgtaaccttcagtgaatattaaaaaaatcagtctcctgtgcgcccttctgggcgcatttgttttgaccgttgttttgcttcctccaggcatgctctccctcggcacgctaaaaatgcaccagcaaacgttgctcgatcgtgtggagcaggcgcctcttcagagcgcgctgatctattttgcggtttacgttctgctctccgcgctgtcgatccccggagccgcgcttctgacgctgctcggcggggcgcttttcagcctgtgggaggcgacgctgttggtgtcatttgcctcgacgctcggcgccacgcttgccatgctcgttagccgttatctgctgcgcgactgggtgcaacggcgctttgccgcacagatgagcacgatagatgcggggatggatcgcgacggcgcacgctacctttttgccctgcgcctgatgccgttgttcccgttctttctggttaatttgctgatggggctaacccgtctcagggtgcgtcactactggtgggtcagccagcttgcaatgctacctgccaccgtcatttatctgaacgccggacgcgagctggggaaactcacctcgctgcgcgatattctgtcgccgggactgctgttcgcctttacactattagggttattaccgctggtcactcgctggctgttttcccgttacatcccttcgattaaaaagtgaggcattatgcgccgggtgcgtttttgcgcgtttctgacgagtctgctgctggcaacctctgccttcgccgcagagagctggcaatccattcagcaacaggccaccgggcagaccgtctggtttaacgcctggggcggtgacgaggccgttaaccgctacctcgactgggtaagcggcgagatgaaaacgcactacgccgtcaacctgaagatcgttcatctggccgatgccgccgacgcggtgaagcggatccagacggaacatgccgcaggacgcagcagtaacgggtcggtggatctactctgggtaaacggggaaaacttccgcaacctgaaagcggcaaacctgctgctcaccggctgggcgcaaaccctgcccaactggcgctacgtcgatacccgtaaaccggtaacggaagattttgccatcccgaccgatggggcagaatccccgtggggcggcgcgcaattaacctttatcgcccgtaaagcgagtacgccgacaccaccggcagatccccacgcgctgctggtatacgcccgacagcaccctggcaaggtgagctatccgcgaccgccggattttaccggcacggcgtttcttgagcagctactgctggcgctgaccgcccatccggaggcgttaaaaaacgcgccagacagaacctttgcgcaggtcaccgcgccgctgtgggattaccttgatacgctgcaccccctgctgtggcgcgaagggaacgattttcctccgtcgcctgcgcgcatggatacgctgctggccagcggcagactgaacctgtcgctcacctttaaccccgcccatgcgatgcaaaaggtggcgagcggtgaactgcctgccgacagctacagtttcggctttctcaaaggcatgatcggcaacgtccattttgtcgccatcccggcaaacgccagcgcgagcgcaggcgcgaaagtggtggcgaatttcctgctgtcaccacaggcgcagatccgcaaagctaatcctgccgtctggggtgacccgagcgtgctggatggcgaaaaactgcctgcgaaagcggcaaaacagcttcgcgcctttaccccctcaggcacgcctgatgtacttcccgaacctcacgccgcctgggttaacgccctggagcaggaatggcttcgccgctacggaacccgctaagcgggctggtctgggcggcaatggcggtcatctatctgcccctgcttcccgccagcggcatgctgctggccccggcgttttcactcagtaactgggcgacgctgtttgccgatccgcagctgccgcgggcgctggccgccacgctggtttccacgcttatcgcgacgctgggctctctgtttatcgctctgatcctgcttgcgcttctctggccgggtgatggctggcagcgccttagcacccgtctgccgtggctgttagccgtgccgcacgtcgccttcgccaccagcgcgctgctgctgtttgcggaaggggggcagttttaccggatctgtacggtctgttcgccgcagcttgaccgctacggtatcgggcttggcctgacgcttgcggtcaaagagagcgcgttcgttctgtgggcaatctacgccgcgctgcctgaaaagcgcctcgcacagcagaaaattgtcctgcataccttcggctacggacgaatgcaggcgctcaactggctcgtcctcccggcaatcgcccccgcgctgggcgccgtgatgctggcggtgctggcctggtcgctttccgtggtggatgtggcgatcgtgctcgggccaggcaacccgcctacgctggcggtactggcctggcagtggctcgcccagggcgatgcacaacagcaaacaaagggaacgcttctgtgtctggtgttgctcctgctgctggcggcgcttgccgcggtgggatacggcttctggacggcatggcggcgcgcccagcgtgaccccaccggagttcgtcgcgcttcgcatactgcgctgcccgcacggacgctgggcgggttactgccgctgtgcggcgtgctctgtgcgctggttctgctgatgctggcacgccgggacgacatcggccccgtcagcgacagcctttcactggggctgctgtccagcctgacagcgctggccatcctcatgctctggcttgagtggggaccccagcgcggcgcggtgtgggtctggctgccgctcgccctcccggcgctgcccctcgtgtccgggcaatatgccgtggcgctgtggctgggcatcgacggccagtacgctgcggtgctctggagccatatgctctgggttctcccgtggatgctcctggtgctgcaaccggcctggcgcaggctcgatccccggcttatcctcaccgccagaacgctgggctggcgacaggcgaaaattttctggttggtgaaatgccccctgatgattcgtccggccctgctggcctttgccaccggcttttccgtgagcatggcccagtacatgccgaccctctggctgggagcgggacgtttcaccaccctgacgacggaggcggtcgccctcagcagcggcggcagcattccgatcctcgccagccgggcgctgggtctgttgctgttgaccagcagcgtatttgcccttgccgcgctgctctcccggctcgtgggccgtcacagacaaggattacgttaatgctgaacgtgaaaaatctcaccattgcgccactcttccgtgaggtcaacttccgcgtcccggcgggggagattgtcacgctgatggggccctccgggagcgggaaatcgacccttttcgcctggatggtgggggcgttatccgctgattttaaggcgcacggcgagctgtggctgaacgatcgccgctgcgatatgcttcccgtggaaacgcgcgggatcggcattctgtttcaggatgccctgctgtttgacgccttcagcgtggggcaaaacctgatgctggcgctgccggcgcacatcgtcgggcgcgcccgccgcaacgcggtagaacaggccctggacactgccgggctggcaaaccactacgccagcgatccggcgaccctgtccggcggcgagcgcgcccgggtcagcctgttgcgcgctcttctcgcccagccgcaggcattgctgctcgacgagccgttcagtcgactggataaaacgctgcgcgcctcattccgggcgtgggtattcgaggttactcgccagcgcaggatcccggtggtgctggtcacgcatgatgaggacgatattccgcccggcggcgaggtgattgagatttctcgctggcaataatgtgctaacgcaatgtttttggcttcaggagagacgacaatgcccccctcttttaatgacgtcaggtttttcgatgaaacgtgtttctcaactgaccgcgctggccctgctctgcggcctcgcctcactctcctccacggcggctgatatgccccactccctcacgctggaccagctccaggcgcaaaacggcgcggtaattgatacgcgcgtcagtgcgttctataacggctggccgcagaccctgagcggaacgtccgggcatgaacccgccgcgcttaatctctctgccagctggcttggggcaatgagcgatgaacagctcagcggctgggcaaaacaacatcggcttacgccagacatgccggttgcgctctatggcaacgatgatgacaaccagaccgtcaaagcgcggctggagaaagcgggctttacccacgtctccaccctgagcgatgccctgcaacaatccgaccgtctgcaacgtctggcgcatttcgaacagctggtttatccgcagtggatccgccagttgcagcagggcaaacccgttaccgccgcaccagccggagaatggaaggtgatcgaggctggctggggtgcgccgaagctttatctcctgagccacattcccggtgcgggctatatcgacaccaatgaagtggaaagcgaaccgctgtggaataaggtctctgacgaaaagctgaaagcgatgctggcgaagcacgggatccgtcacgataccaccgtcattctgtacggtcgcgacgtgtatgccgccgcgcgcgtggcgcagatcatgctctacgcgggcgtgaaggatgtgcgaattctggatggcggctggaaggcgtggtccgacgccagcctgcccgttgagcgcggaacgcctgcaaaggtgaagccagcccctgattttggcgcgccgatcccgggccagccccggctgatggtggatatggagcaggcccgaggaatgctgcaccgtcaggacgcctcgctggtgagcattcgttcctggccagagtttatcggtttaaccagcggctacagctatatcaagccaaaaggtgaaattgccggtgcgcgctggggccatgcgggcagcgacgcgacccacatggaagatttccacaatccggatggcaccatgcgcagcgccgatgatattgccgccatgtggaaaacgtggaatatcctgccggagcagcacgttgcgttttactgtggtaccggctggcgcgcgtctgaagcctttatgtacgcccgcgccatgggctggcagaacgttgccgtctacgacggcggctggtacgaatggagcaaccatccgcagaacccggtctccaccggggagcgcggaccggaaagcgcacgctagcggggaagtgatttcagcgtgatataaccgctccagatgcgcgttgtggtggtcagccagcacaacgcgccaaacgtccaggcaaacagcgcgaaatgcgccggaaacaggcagcacagcacaaacagcgcgatggtctccgttccttccgttaatcctccaatgtaataaagcgacttgtgcgcatagccggggttgtcgatatcatgcttccccgccagcgcggcaaaggccaggaagctgctgcccgtccccataaacgcgaacagcagccaggcggcggcgatcgcgttatcagccggagcggccagcgcaaagccaaacggcaccagggcgtaaaacaggaagtcgagggcgatatcaagaaatcctcccgcgtccgtcaggccacggcgacgcgccagcgcgccgtccagaccatccagcagccggttcagcacaatggcgatcagcgccgccggataccagcccagcgccagaaacggtaacgccagcacgccaatcgcaaacccggcgagcgttaagccatcaggcgtgataaacggtttatccagcgcggcggccagctgatttaacccgggtttcagccgggggtgcagatgtttgtccagcatgcggtttacctttaaacgtggcgcacagcccctgagccggaatatccagcgcggcgttaaagcgggcggaaagattctgaaaggcaatcagagccgtcatttcggtgatggtctcttccgtaaagtggcgcttcagcagacttttgatattttcatccacctgaggtggcgtggcggtgaccgcttccgcataggccagcgccgcgcgctcctcttcgctgaacagggtggaattttgccagtcgctgacggcctgcactttatccagcgccccgctccgctcggccagacgcaggctgttggcatcaatacaaaatgcgcagtggcagatctgcgagacccgcgtcattagtagcgatcgcagaaccggcgtcaaacgcgccttgcgccgctccagatagccgacaaacagcgccaccagccagaaaagacgcggcatacgcccccaccagcgcgtggggttcagcaccgcgccgaagtgttttttctgcatggcggcgatggggctgaggctgacgggaagggtttccatgggcgcaacccaggcggatgtctctttcacctgattctcctgatgactggactctttggaagggcacgataatatgtcgtttttcgctattaattattgacgaacatgctgaaaacactcgatgtggttgcggccatcctcgaaaaagagggcaagattttgctggcgcagcgtcccgaacatgccgatcagccaggaatgtgggaatttgcaggcgggaaggttgaagccggtgagacccagccgaaagcgctgatccgcgaactgcgcgaagaactcggcattgaagccgtgcccgcgcggtatgtggcaagccaccagcgggaggtgtcgcagcggctgattcacctccacgcctggcatgtgcctgaatttagcggtcagctgaaggcgcattatcactcggcgctggtatggtgcacgccagaagacgcgttcacgtatgctttagccccggcggatataccgctgctggaagcgtttattcttttacgcgacgccagaccagcggatttgtactgagggtgcgttcatcacgctggcactgcaacagcacgccatctgccctgaccactgcgccttcggaatagttttgatcgtgatagatacagcactgattacacggctgcgcacgctggccgccagcgctaaaaacctctggcggcacgttgacctcgacatccgggcgaatgcggtcagcctgtgccccggcggacaccatcaaacataacgcggccattgcgtaacggttcatagactttatttcctttgcatcgtttatatctataacggtcgatccggacgggatctttaatttatctcgtcatcgcttttggttatgatgcgcgccctgtcattaatttcccttgcggcataaatttctgcttgcctctcaaagcggtgcgggtggtatagtcaaaaaaacgacacaaaacatctacgccacacgcataaattattataagaggttcttatatctatggatcagacacgctctctggaaagctttcttgcccatgttcagcagcgcgacccgcaccaaagcgagtttgcccaggccgttcgtgaagtcatgaccaccctgtggcccttccttgaggaaaatccgcgttaccgtcagatggcgctgcttgaacgtctggtagagccggagcgcgtcatccagttccgcgtggcgtgggtggacgaccgcaatcaggtgcaggtcaaccgcgcgtggcgcgtgcagtttaactccgccattgggccgtttaagggcgggatgcgcttccacccctcggtgaacctgtcgattctgaaattcctcggcttcgagcagacctttaaaaatgcgctcactaccctgccgatgggcggcggtaaaggcgggagtgatttcgatccgaaaggcaagagcgaaggcgaagtgatgcgcttctgccaggcgctggtcactgagctctatcgccaccttgggccggacaccgacgttcctgccggggatatcggcgtgggggggcgtgaagtgggctttatggccgggatgatgaaaaagctctccaacaacagcgcctgcgtctttaccggcaaaggtctgtcgtttggcggtagcctgattcgcccggaagcgacgggttatggtctggtctatttcaccgaagcgatgcttaagcgtcacgggctgagcttcgagggaatgcgcgtggcggtctccggctccggcaacgtggcgcagtacgctatcgagaaagcgatggcgtttggcgcgcgcgtggtgaccgcctccgactccagcggtaccgtggtggatgaagctggctttacggcagaaaaactggcgcgtctgtgcgaaatcaaagccagccgtgacggtcgggtagcggattatgcccgtgagtttggcctgacctatctggaaggtaaacagccgtggggcgtgccggtggatatcgccctgccgtgcgcgacgcaaaacgaactggacgtggatgccgcccggacgctgattagcaatggcgtgaaagcggtagcggaaggggcaaatatgcccaccactattgaagcgaccgacctgttcctggacgcgggcgtgctgtttgcgccaggcaaggcggcgaacgctggcggcgtggcaacatccggtctggaaatggcgcaaaacgccgcgagaatgggctggaaggcagagaaagtggatgcccgtctgcaccacatcatgctcgatattcatcacgcctgcgtggagtacggcggcgaggcctcgcaaactaactacgtgcgcggggcgaatatcgccgggttcgtgaaggtggccgatgcgatgatcggacagggtgtgatttagtttcgctgcattctcgcccttgtaggcccggtaagcgctggcgttaccgggtcattactcaagccggttaataagttcacggctgcgctctatcatgttgagtgagtgcctgtcattgcgctgtagcagtccgacaaataacaaatctgttatacaattttgggcagttcgggaagagatcgatgagctgcgccattcatcttcgttcgataccgtctccagaatataatcaaccctctcccgcaaaggattatttgccagtgatgttatagctatgatcttcgcgcctttctcttttgccgcttctgcggcgatcaatatctcctttttcttacctgagtaagacaaggaaatttgtatatcatctttattcaaagcctgagcaacagatatttgcacatgtgtgtcaatctcacatgttacacgatagccaatttttaataatttaaaagcgagatcttttgcagccagcgcagagcctccgagaccaacaatttgtatatgcctcgccttatctattattcctattatcttttccagttttacaaaatccatatttactgtcgtttctcttaatgcatgaactttttctgcaattaacttatcagctattacatttaaagggtcagaactatgaatagtactgtgaaggctataatcagcttttgctacttttttctctgctgtattcttctatcagcatcaattttagatcggcgaagccgtgagcaccgagttttttggcaaactttgaaatagatgattgggcgacacacaatgctagcgcgattgagtgggaagaacatcctttgaaagcatcaagatgattgatgatgtatagagcaattttcttctctgtatcagtataattattataatccattcttatttttttcaaataactcataaatcacccctataacatctaaaaaagcaatgtattctctcttaaagataaatacaacacataacgatcaaaacctcgaatataaattttgacagtcatcacaaacatttaaaaggaatttatgattccatttaaaatgaatttaaaacgatcaacaattcccgcgaacaaacatcataccactctactaagaataggatttatttatgagaaatggactgaaacatttatcctggttattaattacacttgcttcttcaggccatgcagccgtcatttatcaggctaacgatggctctaacattgacctttacgggcgccttggttttaacgtatcagataaaaaaacaggtgacgtttcaggcgattttgatggtcgaattggtttctcggcacgccagatgattgatgacaaatttgccgtgattggttttacacaataccaggtgaatgcagccgaatacgcaaacaatatcaaagcggaggacccagacgatttgaccgcacgatatgtctgggcaggcgttgacttcgccgagtacggtaaaatcacagcaggacgcgtttcatccggcctgattatgtttacagacattggtgatgtatttgcctcgtcagacgttgctatggcccgccaggcaaattttatcgatcccaccgctgttcaggttttccgccaggatggcaccatacagtaccagaatacgttaggaaatcttgacgtatccagtgcgtggattattggcaataattcatctgaccttgattacggcataaatactgctctgcgttatacactcgatctcggctttgcgggcaagcttcagcctgttatcgccgtgcagcaatcgcaggccagtcatgatgagacctctgcgcaatctgatgatgatgctgataaataccagatgtggggagtaggtactcgttattatttgggtgattttatgtttggtctactctattccgaagatactgttgagtatcttgatggccgtccggacagcactgataaagattacgaagcaacaattgtctggtcgctgacgcctgaatggtggctccggactggctatcgtcatttagaaaatcatgacggtgacggacttaagcttcgagatgcgacctttgaagttcagtacaaagccaccgcaaaaagctcagtttatgcctcgtattcctggcgcaatggtgaagccggcaccaacagggttactggcgacaacgtttcttttggtggtagcgacccggcagatgactatttccacctcggattacgctatgaattttaaatgctaatcaggcactctacgtcgccttatataagggtatagcgtttactcttatttacaggggttatctatgataagcattactattattattttttatgtcgagctttgcatgcgccagagtcacacttgacttgggtgaaaacattgttgttctggccgctaaagattcgaagctatctctcttttcaaagagtctgactctaccagacggcgagcaaaagcttgttattaaattcgatagttccgtcaatccggaatccgtcaatcaaggtaaagggcgaatgacctcagcaccttatatatttacatttaactatagcggcagagaaaaactcatacttaccaccccgaaggtcatcgatgaaaaggaggttatagaccaggctcgcaatccacaatttatgctgaaggccaatgatactaccatcccctttaccatggaaaaagttttcccagagagcattaacattttttctgatttcaggtcattcctcgctgaggataaaaatcaaatcgacggtataaaacaagacagcacagataaccttgatcaggttaaatcggcctatcttggcttacctgataaacagaaactctcattcatgaaatggttgttaaataattaagagattaatatgaatttaaatttgagcaagatggtgactgaaaacgctaatccagcatctatggaaattgaccgactaagcacagttgaaatgtgcagggtgatcaatgcggaggatcaaaaagtggccctcgcggtagaaaagtgtttacctgatattgcagccgctgtggagttaatcgctaaagccgtcgcaaagggcggtcgcttaatctatgttggcgcaggcacctccggacgattagggatccttgatgccagtgaatgtccgccaacctatggcgtaaaaagcgaactggtgcagggaattattgccggtggtcatactgcaatcctgaaagccgtagagggggctgaagataaccgccaggcggcaattcacgacctgaccgctattgacctctctgtggctgatactgtcgtgggtattgctgcaagtggacgtacgccatatgtcgtgtccgcgctagcgcacgcacgcaatgtaataggttgcaatgttatttccatagcatgtaaccccggcagtgaaattgctgaatacgccagtgttgccataacgcctgttgtaggctcagaagtgataacgggatcctcgcgtatgaaagccgggaccgcgcaaaagctgatcctcaacatgctttcaacctgtttaatgataaaaatgggaaaagtgtatggcaatttgatggttgatgttgtcgcttctaaccgaaagctctttgaacggcaaattaagatcgttaccgatgctactgcctgctcacggcgcgatgcagaaaatgcgttgaagcaatcacaccgnnnnnnnnnnnnnnnnnnnnnnnnnnnnnnnnnnnnnnnnnnnnnnnnnnnnnnnnnnnnnnnnnnnnnnnnnnnnnnnnnnnnnnnnnnnnnnnnnnnnnnnnnnnnnnnnnnnnnnnnnnnnnnnnnnnnnnnnnnnnnnnnnnnnnnnnnnnnnnnnnnnnnnnnnnnnnnnnnnnnnnnnnnnnnnnnnnnnnnnnnnnnnnnnnnnnnnnnnnnnnnnnnnnnnnnnnnnnnnnnnnnnnnnnnnnnnnnnnnnnnnnnnnnnnnnnnnnnnnnnnnnnnnnnnnnnnnnnnnnnnnnnnnnnnnnnnnnnnnnnnnnnnnnnnnnnnnnnnnnnnnnnnnnnnnnnnnnnnnnnnnnnnnnnnnnnnnnnnnnnnnnnnnnnnnnnnnnnnnnnnnnnnnnnnnnnnnnnnnnnnnnnnnnnnnnnnnnnnnnnnnnnnntaaatcagccattgtaatgattttgagtcagtgttccgccgatgacgcccaagcgttgctgtcgaaaaacgggggttatatacgggcggccatttttaaggaagcgaaataatgtctaaacatattagcaccgatctactcgcgaaaattattgttctggcaggtggcaaaaacaacattctgcattgtggcaattgcatgacccgcttgcgtctgaaagtggcggatacaacgttaatagcacaccatgtgaaagaacaactctcagagagtgtcagtggtgttgttataaacggcaacgaagtgcaggtcatttttggcgttggtaaagcgcagagagcggcagatagcatgaataatctgctagacaaaaaagatttgcatgcaatagccgatgaaaacaaaagtcagctcaagagtaagcagcaatcatctttgcaacaattcctggcaaactttgccactatctttactcccctgattccgggctttatcgcgtcaggtttgatgctcggtatcgccacgttgttagggacgttaatgcatattgcgccagaagctaaaggaacactccctgatgcgctaaatttcttgaaaatttttagtaaaggactcttcacctttcttgtgattttagtgggatacaatgcgcaaaaggcattcggcggtactggcgtaaacggtgcaatcatcgcggcactgtttattctgggttataacccgtcagccacagtaggctattattccggactacaggatttttttggtctcactatcgacccgcgcggaaatatcatcggcgtgctgctggcagcatgggccggagcgaagatcgagcgcgttataagaaacgttattcccgatgagctggacatgattttaacgtcgatgctgacactcattttcaccgctgtattgacatatattgtgatcatgcccattggtgtctggctgtttcaggggatgtcctggctgtttatacaccttaacagtaatccgttgggctgcgctgtactggcaggcgttttcctgattgctgtggtatttggcgttcatcagggatttattcctgtttatctcgcgttaatggactctcaggggtttaattctcttttccccatcctctcaatggctggagctggacaagtaggtgccgcgctggcgttatactggaaagcagacgtttcttccacgctgcgtacacaaattcggggagcaatcatccccggtatattgggtgtcggtgagccgcttatttatggcgttaccctaccacggatgaagccttttattacggcctgtataggcggcgcagcaggcgggttattcattggaactattgcatggttagggctcccggtcggcctgaacagcgcgttcgggccatctggcctggtagctttgccgcttatgacctcagcaaaaggtatatttccagctattgcagtttatggtgtaggtatagtgatttcctgggtatgcggttttattataacccttctttttggttgcaagaatgtggatttacattgagggaacaaccatgaaacgacatgctttttttgcctctttacttgctttatcggcttctgtttttgcgaacaactatccggttctgacgaatgcacaaccggaaagcgtgggctttaatatcgataaactgaaaaaactggatagctggattcaggatcagatcaacgccgggtatccgggtatgaacgtcgtcgtgataaaagacaatcatatcgtctttcaaaaagcctggggttatacaaaaaaatacgacgactcccatttgatgggtaatccgctacgcgcgacaacagagacaatgtacgatctggcttccaacacaaaaatgtacgccacgaatttcgcgcttcagaagttggtttacgaaggcaaaattaatgtcaacgatcgggtcacgaaatacatacccggattcacagatcaactcacagagaagattaaaggaaaagatgccctgcgaattattgatattttgcatcataccgccggcttcccggccgatccgcaatatccaaacaagcgtgttgcaggcagcctctactctcaggataaacagaccacgctggagatgattaagcgaacgccgcttgattattcgccaggtacaaaacatgtctacagcgacgtcgattacatgatcctcggatttatcatcgagtccgttaccgcaatgccgcttgatgtgtatgttgagaaacatatttaccagccgctcggcctgaagcacacggtgtttaaccctctgttaaaaggctttaagcaacagcaaattgccgccaccgaacttaacggtaacacccgggatggtgtaatcagttttccgaatattcgtaccactaccctctggggccaggttcatgatgaaaaggcatggtattccatggagggcgtttcaggtcacgcaggtctgttctcaaatacacatgatattgccgtgctgatgcagaccatgcttaacggggggcattatggcaacgttacgttatttgatcagagtacagtagatgagtttacccgtagctcggcagcagatgtcacctttggactgggctggagggttaacggtaattcctctatgaccccaacctttggcgtactggcaagccctcaaacctatgggcatacgggctggacaggcacgctcaccgccattgatcccgtaaaacgtatggcgattgtcattctgggcaaccgaccacactcccccgtcgctgatcctaaaatgaatccgaatgtttttgtcagcgggaccttacctgcggcaacatatggatggattgtcgatcagatctatggcgcactgaacgagtaaacgccacccttcttgccgggtggcggcttcgccttacccggcctacggtttaagcggttgtatttttggctgcgcttttcttcttttnnnnnnnnnnnnnnnnnnnnnnnnnnnnnnnnnnnnnnnnnnnnnnnnnnnnnnnnnnnnnnnnnnnnnnnnnnnnnnnnnnnnnnnnnnnnnnnnnnnnnnnnnnnnnnnnnnnnnnnnnnnnnnnnnnnnnnnnnnnnnnnnnnnnnnnnnnnnnnnnnnnnnnnnnnnnnnnnnnnnnnnnnnnnnnnnnnnnnnnnnnnnnnnnnnnnnnnnnnnnnnnnnnnnnnnnnnnnnnnnnnnnnnnnnnnnnnnnnnnnnnnnnnnnnnnnnnnnnnnnnnnnnnnnnnnnnnnnnnnnnnnnnnnnnnnnnnnnnnnnnnnnnnnnnnnnnnnnnnnnnnnnnnnnnnnnnnnnnnnnnnnnnnnnnnnnnnnnnnnnnnnnnnnnnnnnnnnnnnnnnnnnnnnnnnnnnnnnnnnnnnnnnnnnnnnnnnnnnnnnnnnnnnnnnnnnnnnnnnnnnnnnnnnnnnnnnnnnnnnnnnnnnnnnnnnnnnnnnnnnnnnnnnnnnnnnnnnnnnnnnnnnnnnnnnnnnnnnnnnnnnnnnnnnnnnnnnnnnnnnnnnnnnnnnnnnnnnnnnnnnnnnnnnnnnnnnnnnnnnnnnnnnnnnnnnnnnnnnnnnnnnnnnnnnnnnnnnnnnnnnnnnnnnnnnnnnnnnnnnnnnnnnnnnnnnnnnnnnnnnnnnnnnnnnnnnnnnnnnnnnnnnnnnnnnnnnnnnnnnnnnnnnnnnnnnnnnnnnnnnnnnnnnnnnnnnnnnnnnnnnnnnnnnnnnnnnnnnnnnnnnnnnnnnnnnnnnnnnnnnnnnnnnnnnnnnnnnnnnnnnnnnnnnnnnnnnnnnnnnnnnnnnnnnnnnnnnnnnnnnnnnnnnnnnnnnnnngaccacgtgctccgccagcgggcgatgcagcagccgtccctcttcgtcctgatatgactcacaggcatcgcttggctgccagacggcggtaaagcgttcgtctttcggcgtgacgatatgcgctttgacttcgaagaagtctttggcgacgaaattttcgatctcttcgtcgcgacgcaccaccagccccagcaccggtgtctggacacgaccgacggagagtacgccctgataacccgcgttgcgcccgagaatggtgtaggcgcgggtcatgttgatcccgtatagccagtccgcacgggcacgcgccagcgcggagacacacaggggaataaattcgctgttggcgcgcaggcgtgaaatggcccgctctaccgcctgagggttgaggtcgttgatcaggcagcgctgcacctgctggcgcttttccggcgccagctccaggtagtccagcacttcatcgaccagcagttgcccttccctgtccgggtcacccgcgtggaccacttccgtcgcctcatgcaggaagcgcttaatgacgttgagctgtttggtgacggaaggacgcggttggagacgccacttttccggcacaatcggtagatcgttgagattccagcgggcgtagcggctgtcgtagacatccggctgcgcctgttcaagcaggtgaccgatacaccaggtgaccacctgcccgttaccgcattcgataaagccgtcgcctttgcgatgcggcctgggcagcacatcggcgatggcacgcgccagactcggcttttcggcaataaacaaccgcatcgaattaacggatctcaatcatcgggcgaccaccgcgggcggtcaccagctcaccaatggccgtcagggtgatgccaaactcggcagccgtcgcctgaacgtcagcttcagcttccggcgtcaccgccagcagcaggccgccggaggtttgcggatcgcacagcaggttacgccacgcttccggcatttcgcccattaaatggccgtagctggcaaagttgcgctgcgtcccgcccggcactgcgccctgagcaatgtactcttccacgcccggcagcttaggcacatcctgataccagacctgcgcctgcacgcccgcgccctgacagacttcagagaggtgccccagcagaccaaaaccggtcacgtcggtcatggccttcacgccgtcgatattggcgaatgccgcaccggcgaggttcatctggcacatcacttccgttgccagaccgatatgctcgggcttcagcagggatttcttctctgcggtcgtcagtacgccaatgcccagcggcttggtgaggaacagtttgcagcccggttgcgcggtgctgttgcgcttcacgcgctcggtcggtaccacgccggtgacggccaggccgaagatcggctccggcgcatcgatagagtgaccaccggccagggcaatacccgcctgctggcaggcaaagcgtccgccttcgatcacgtcgcgggcaatctccggcgggagggtgttaatcggccagcccagaatggcgatcgccataatcggtttaccgcccatcgcaaagatatcgctgatggcgttggtggccgcaatgcgcccgaagtcgaacgggttgtcgacaatcggcataaagaagtcagtggtgctgataatgctggtgccgttacccaggtcataaaccgctgcatcgtcacgcgtttcgttaccgacaagcaggttcgggtcgacaaacttcgcctgttcactgtgcaggatggtctccagcactttcggggaaattttacaaccgcaaccggctccgtggctgtattgcgttaaacgaatggtttgctcgctcatggacgtctcctgtcatctcaatcgcgctatggtagcgctcattccataaagaggtaagtatgactgtctgaattctgcggcggatgctcagaatccagacagtttagcgcgggtgattaaaaacggctgacgaaaggcgtggtgtccggcacgctaatggtgctggaggctttaagctgcggggtgccgagatagaggaagccgacaattttatcatgttcaccgcaggagaagccttcccgcacggcggcgctcccggtcagcggcccggtacgccagatgccgttaaagccctgcgcgacggcggccatctgcattgccattaccgcgcaaccggcagacatctcctgctcccagaccggcactttatgatcggcctgacattttgcgactaccgcgatgatcatcggcgcacggaacggcgcgttgcgggctttatcaatccccttctcatcctggcctgcggcaacagccccctgctccagcagctggctgaagcggttgcgcccttcgccttcaatgataaagaagtgccacggctgcaatgtgccatggtccggcgcacgcattccggcacgcagaatgttttccagctgctcgccgacgggtgccggttcggccaggcgggaagcgctacgacggttaacaagcagttcaagtgcgtccattggttaactcctttcatgaaatttactcacaaaattaacacgacagcagaatttgttacagcgtggcaggcgattcctgctgacaagtggcggttgggtcattacgataaccgcacattaccgtcccgtggcgacggaaacagtccttttctggttagggagaatacatgcgaaccctttggcgaatctttgccggtttctttaaatggacgtggcgactgctcaacttcgtccgcaacctggtgatgaacatcttcttcatcttcctggtcctggtatgcgcaggtatctggatgcatatcagcaacgcaaaccagtcgcagcattcgacgcgcggcgcgctgttactcgatatcaccggggtgattgttgataagccatcgaccagcaaccgtctgggcgtgattggtcgccagctgttcggcgcaacgtcagaccgtcttcaggaaaactccctgtttgatatcgtcgacaccatccgtcaggctaaagacgatcgtaacattaccggtatcgtgctggacctgaaagattttgccggcgccgatcagccgtcaatgcagtacatcggtaaggcgctgcgcgaattccgcgacagcggtaaaccggttattgccattggcgacagctacacccagggacaatattatctggcgagctttgccaataagatctggctttcgccacagggcacggtcgatctgcatggcttcgccactaacggtctgtactacaaatcgctgctcgacaagctgaaggtcaccacccacgtcttccgcgtcgggacctataaatccgccgtggagccgtttatccgcgatgatatgtcccctgccgcccgtgaagcggacagccgctggattggcgagctgtggcagaactacctcggcaccattgccgctaaccgtcagattaccgctgagcaggtcttcccgggcgcgcgcggcgtgctggacggcctgcgcatggtggacggcgatacagcgaaatacgcgcttgataacaaactggtcgatcagctgggttccagcgctgaaattgaaaaagcgctgaccaaacagttcggctggagtaaagaggataaaaactacagcgccatcagcatgtatgactacgccgcgaaaaagccggacgacagcggtgacagcatcgccgtggtgtttgctaacggggccattatggatggcgaagaaacgccggggaacgtcggcggggacaccaccgcgtcgcagatccgcgatgcgcgcctggatccgaaagtgaaggcgattgtcctgcgggtgaacagccctggcggcagcgtcagcgcctctgaagtgatccgtgctgaactggccgccgcgcgcgccgcgggcaagccggtagtggtctcgatgggcggcatggcggcttccgggggctactggatctcgacgccagccaactacattgtggctaacccaagcacgctgaccggctcgattggcatcttcggcatgatcaacaccgtagagaacagcctggattatctcggcgtccacaccgacggcgtctccacctcgccgctggcggacgtgtccgttaccaaatccctgccgcctgaggtgtctgagatgatgcagctcagcattgagagtggctataaacgtttcatcacgcttgttgcggactcccgtaaaaagacgcccgatcagattgaccagatcgctcagggccacgtctggaccggccaggacgcgaagagcaacggcctggtagacagcctgggtgacttcgacgacgccgtgaagaaagcggcggagctggcgaagctcaagcagtggcacgtggactattatcaggacgaaccaacgttcttcgatatggtcatggacagcatgtccggctccgttcgtgccatgctgccggacgcgcttcaggcttatctgccggcgccggtggcgaccgcggcgaaagccatgagagcagagagcgacaagctcgcagcctttaatgatccacaaagccgctacgcgttttgcctgacctgtgcgaacgtgcgttaaaaaccgtcccctcttcccgtgaagaggggattttttcttttgaagaacaagaactcattaccatgcagaagaaatcaatttatgtcgcctataccggcggtaccatcggtatgcagcgctcagaaaatggctatatcccggtttccggccacttacagcgccagctggcgctgatgcctgaattccaccgtccggaaatgccggactttaccatccacgaatatgagccgctgatggactcctccgacatgacgccggaagactggcagcatattgcggacgatattaaagcccattacgaccagtacgacggcttcgtgatcctgcacggcaccgacaccatggcgttcaccgcctcggcgctctccttcatgctggagaacctgagcaagcccgtcatcgtgaccggctcgcagatcccgctggcggaactgcgttcagacgggcagatcaacctgcttaactccctgtacgtggccgctaattacccgatcaacgaggtaacgctgttcttcaacaaccggctgtaccgcgggaaccgtaccactaaagcgcacgccgatggctttgacgcttttgcctcacctaacctgcaaccgctgctggaagcggggatccatatccgtcgtctgggcacgccgcccgcgccaaataccgcaggcgaactgatcgttcacccgatcaccccgcagccgatcggcgtggtgacgatttatccgggtatttccgccgacgtggtgcgcaacttcctgcgccagccggtgaaggcgctgatcctgcgctcctatggtgtgggtaacgccccgcagaacggtgaattcctgaaagagcttcaggaggcgagcgatcgcgggattgtggtggtcaacctcacccagtgtatgtccggcaannnnnnnnnnnnnnnnnnnnnnnnnnnnnnnnnnnnnnnnnnnnnnnnnnnnnnnnnnnnnnnnnnnnnnnnnnnnnnnnnnnnnnnnnnnnnnnnnnnnnnnnnnnnnnnnnnnnnnnnnnnnnnnnnnnnnnnnnnnnnnnnnnnnnnnnnnnnnnnnnnnnnnnnnnnnnnnnnnnnnnnnnnnnnnnnnnnnnnnnnnnnnnnnnnnnnnnnnnnnnnnnnnnnnnnnnnnnnnnnnnnnnnnnnnnnnnnnnnnnnnnnnnnnnnnnnnnnnnnnnnnnnnnnnnnnnnnnnnnnnnnnnnnnnnnnnnnnnnnnnnnnnnnnnnnnnnnnnnnnnnnnnnnnnnnnnnnnnnnnnnnnnnnnnnnnnnnnnnnnnnnnnnnnnnnnnnnnnnnnnnnnnnnnnnnnnnnnnnnnnnnnnnnnnnnnnnnnnnnnnnnnnnnnnnnnnnnnnntgtatgtccggcaaagtcaatatgggcggctacgccaccggtaatgccctggcgcacgctggcgtgatcagtggtttcgatatgaccgttgaggcaacgctgactaaacttcactatttactgagtcaggatctggatattgattccattcgccgcgccatgatgcaaaacctgcgcggtgaactgacgccggacgaataaggaggtcccatgaagcaacgcgccctgttactggtcgatttgcaaaatgatttctgtgcgggcggtgcgctggccgttgcggaaggcgacagcaccgtagacgtcgcgaattcgctgattgagtggtgtaaagctcgtggtgaagcggtggtggcgagtcaggactggcatccggcaaaccacggcagctttgccagccagcacaacgttgagccttacagccagggcgaactggacgggctggcgcaaaccttctggcccaatcactgcgtgcagcagacggaaggcgctgagctgcatccgctgctgaaccagaaggccatcgacgcggtgttccacaaaggtgaaaacccaaccatcgacagctacagcgcgttctttgataacggtcatcgtcagaagacggcgctggacgcgtggttgcgccaccatgagatcaccgagctgattgtgctgggcctggcgacggattactgcgtgaagttcaccgtgctggatgcgctccagttgggctataccgtgaatgtcatcaccgacggctgtcgcggggtgaatattcagccgcatgacagcgctcaggcgtttatggatatggccgcagaaggcgcaacgctgtatacgctggctgactggatggagacgcaggcgtaagctttttagccgggtgacggcttagccttacccggcctactttctctggttttgtagaccgggtaagcgtcagcgccacccggcatttcttccccaatccccataaagtgaactccctcgcatcacaagcgaaacggcgatgctattctcttcaggctgttttttcgccacgccttttctgtggcgtggttatttttattcagtcaaagaggaaattatatgaaacgtttgcccttgctggcagcattacccttgctttgcgcgtcactggcttccgccgcgcccctgatgtccgtgggttacttcaatggcggtggcgatgttaccgccggaccgggtggcgatattaataaactcgacgtccgccagatcacccacctcaactactcgtttggtctggtttataacaacgagaaaaacgaaaccaacgccgcgctgaaagatccggcaaaactgcatcaaatctggttatcatctaaggtggcatccgatctggcgttgcttcctcagcttcgtaaacaaaacccgaacctgaaagtcctgctttccgttggcggctggggggcgcgtggtttttctggcgcagcggcaaccaaagagagtcgcgcggtatttattcgctccgcacaggagatcgtcagtaaatacggcctggacgggatcgacctggactgggaatatccggtcaacggcgcgtggggactggtcgagagcacccctgccgaccgggataatttcaccgcgctgttaaaagagatgcgtgacgcgtttggtaagaaaaagctggtcacgattgcggtgggcgcgaatgcggaaagtccgaaaagctgggtggatgtgaaagccattgcccccctgctcgattacatcaacctgatgacctacgacatggcgtacggtactcagtattttaacgcgaatctgtatgactccagcgcctggccaacggtggctgccgcagacaagtacagcgtcgattttgtggtgaataactatctggccgccgggctgaagccgcagcagatgaacctcggaattggtttctatgggcgcgtgccgaagcgcgccgttgaaccgggtatcgactggagcaaatcggacgcgcagaacaatccggtgacgcagccctacttcgggccgcaggaactgagcctgtttaaatcgcttggctatgatctgaccaaagatacctatgtgaaatacaacgatatcgtccgcaaactgctgaacgatccgcagaaacgctttaccgagcactgggacgaacaggcgaaggtgccgtggctgtcggtgaaatccgccgacggtaaggcgctgtttgcgatttcctatgagaacccgcgctccgtggcgatcaaagcggattacatcaaggaaaaaggtctggctggcgccatgttctgggagtacggggctgacgacgagaaccagctcgcgaaacagctggcggagtcgcttgggatcccgcactaaggtgtagtgtgccgggtggcgctagcgcttacccggcctacatgggagctttatttgaaggtcgcaatcggcttcggcgtgatgccgaagtcttctttaagctcgcgcttgcttttcatcaccatctgaccgttagtgtcgatggtcatatgctgggcgtcggtattgtgacgcgcctgccacagcatcaccagctgcaaactgttctctttttgctcaggtgtgagcgccacaccgtccggccattttcccagctcaacggccgtcaccagacgctgataaacctccggggtcatacctgcaatcatgtcatcaatattcatgatctctccctttcaaaggaataatttgctgaatcgttttttcaacccttggtctggtcgccgttttcatcatcggtaaagctcatggaagccgaatttacgcagaaacgctcccccgtcggctgcgggccatccgggaagacatgcccgagatgggcgtcacagttcccgcaacgaatttcggtgcgcaccatgccgtgcgaggtgtccgtcaggtagcggatcgcatcgtcgctgacaggctcgtaaaagctcggccagccgcagccagaatcgtacttcgtctgggagttaaacagcggtgcatcacacaccaggcagtggtagacgccttcccgtttgttgtgcagcaaacgcccggaaaacggcggttctgtgccgtgattttgcgtcacgtaaaactgcatctctgttaaggtttttttcaaatcgtcggggttacgttggttcgacatatgcttacatctcgctgttgaaacagacatcttttatcccagattctaacaaaacattaacacccgcgcgtgcacttttgttctaaacttatgtgtcgcgaaaaggcggtcaggcaattgtgatcaatttcacattttaatcctgcgaggcctttaaaattccgggcgcagcccccatgtggttgctagctcaaagggaaagtgaggcgagtcagtcgcacaaacgttagtcacaggattgatttgtcgcaatgattgacacgattccgcttgacgctgcgtaaggtttttgtaattttacaggcaaccttttattcactaacaaatagctggtggaatatatgactatcaaagtaggtatcaacggttttggccgtatcggccgtattgttttccgtgctgctcagaaacgttctgacatcgaaatcgttggtatcaacgatctcctggacgctgaatacatggcgtacatgctgaagtacgactcaactcacggtcgtttcgacggcaccgttgaagtgaaagacggccacctggttgttaatggcaaaaccatccgcgttactgctgagaaagacccagctaacctgaaatggaacgaaatcggtgttgacgttgtagctgaagctaccggtatcttcctgaccgacgaaactgcacgtaaacacatcactgcgggtgcgaagaaagttgttctgactggtccttccaaagacaacaccccaatgttcgttcgcggtgcaaacttcgaaacttacgctggccaggacatcgtttccaacgcatcctgcaccaccaactgcctggcaccgctggctaaagttatcaacgacaacttcggcatcatcgaaggtctgatgactaccgttcacgcaaccaccgctactcagaaaaccgttgatggcccgtctcacaaagactggcgcggcggccgtggcgcggctcagaacatcatcccatcttctaccggtgctgctaaagcagtaggtaaagtactgccagaactgaatggcaaactgactggtatggcgttccgcgttccaactcctaacgtatccgttgttgacctgaccgttcgtctggaaaaagctgcttcttatgaagaaattaagaaagcaatcaaagctgcttccgaaggcccaatgaaaggcgttctgggttacaccgaagacgacgttgtatctaccgatttcaacggcgaagtgtgcacttccgtgttcgatgctaaagcaggtatcgcactgaacgacaacttcgtgaaactggtttcctggtacgacaacgaaactggctactctaacaaagtactggacctgatcgctcacatctccaaataagttgagatgagtgcttgatcctaaaaggcgacttcggtcgccttttttattgtttttagacagaggattgcttaatgattaataaaatttttgcacttccggtagtcgaacaacttacccctgtgctctcccgccgtcagatctacggtgctgatatcatcgtcgttgatcatccgcgcgttaaagcctccgtagcgctcaatggtgcccacctgctctcctggaaaccagaaggtgaagaagaaggcctgtggctgagcgaggccacctcgttcaaaaaaggggcggcgatccgcggcggcgtaccgatctgctggccatggtttggcccgtcagcgcagcagggtttaccctcacacggtttcgcccgtaaccagcagtggacgctgaaagcccacaacgaagatgaaaacggtgcggtgttgacctttgaactccaggcgaatgatgaaacgcgtgccctgtggccacacgagttcaccctgtatgcccgcttcaagctgggtaaaacctgcgagattgaactggaagcgcacggcgaatttgaaacaacgtccgccctgcacacctatttcaacgtaggcgacattcaggccgttaaggtgagcggacttggcgatacctttatcgacaaagtggataacgcgaaagaaggcaagctggacgacggcgtgcagactttcccggatcgtaccgaccgcgtgtatctgcacccggaagcctgtagcgtcatccacgacagcgcgctgaaccgcggtattgatgtggttcatcaccaccacagcaacgtggtgggctggaacccgggccctgccctttccgtcagcatggcggatatcccggatgacggttacaagaccttcgtgtgtgtggaaaccgcatgcgtaaccgcgccgcagaaaaccagcgaagaaaaaccgtcccgcttaggccagacgatcaagattgtgaagcgctaatattgttcaggcatcataaaaaacaaacggggcgctagcgccccgttttaatgcatcacgttctggtcagaacttgtaggtcacacccacggagaagatgccagaccaggacttgtcgaccatcgggctgtctttcacttcatcgctcagacgaatgtaacggccagtaccgtacacattccagtcaccgaggaagttatacgaggcggtgagttccaggtacgggtcccagccatcatccgcgctgtagctcttcagaccactgcggcgagactccgctttagatacgccatagtagtagtcgttgtaattctcgctgctgtactgcacaccgatacccggcgtcagcgtcactgcgccgttggtatagcgataaagccacgccagatcccagatgaagccgttgctgttgtccagggtatcgcccgccagcgcagtgcgcaggaagccatactcggtattatggacgtaagaaagccccgccatcagtgagcttctgcgtttgtccagctgacgaagcgcattgctgtcgctgtcgcctggtttaaagtgcgttggatcgtaataggccatgatggagagcttatcggccgtatcgttccacagatagtagccaccgcccaacccacggaaccagaagttatcgccttcataggtgacaacggggacaggataaacgtcgcggtcatactgcttgtacgggctgttaatcacgccagcacccgcgccaacagtccactggctctcagcctgtacggtgctcgctgcggtagcggcaaggatgcccaatgccagaagtttgagtttggtcacaatccattctttcctgtagtcaaataatcagcgggtgaagtgtaaccgccattcccgtacatcccaaaattttttgcgcgctaatccgtttgattaacccgttatttttcatttttcagatgacatcccgctttcatttatgtgaccgataaatgaaaaacccacttttcgcttataaccgcagtggaaatttttggatgagttattgatatgtcattgaaagtagattttatccgtatgcaagttttgcaattgccatctacgctttaatttaagaagaggttttgctgaacaccctgcggttcatagccttcgacctggcacacaggttgctgctctggcagtgaggtgcgaaaaattctcttccgggagcctccactactcatacgaacggctcttatcctgtgctaaaaaacgaaaggacggcatgccatgaatatattcgatcactatcgccagcgctacgaagctgccaaggacgaagagttcacactgcaggagtttcttaccatttgtcggcaagatcgcagtgcctatgccaatgcggcagaacggctattgatggctattggtgagccaaacatggttgatactgccctggagccacggctttcccgtctcttttcgaatcgggtggtcgcccgatacccggcgtttgaagagttctatggcatggaagatgccattgagcagatcgtctcctacctgaagcatgccgctcaggggctggaagagaagaaacagatcctttacctgctgggtcctgtcggtgggggtaaatcctccctggctgaacggctgaaagcgctgatgcagcgcgtgccgatctatgtgctgagcgccaacggcgaacgcagcccggtcaatgaccatccgctgtgcctgtttaatccgcaagaggatgcgcaaattctggaaaaagagtttggcattccgcatcgctatctcggtacgatcatgtcgccgtgggcggcaaaacgtctgcacgagtttggcggggacatcaccaagttccgcgtcgtgaaagtgtggccgtctatcctcgagcagatcgccatcgctaaaactgaacccggtgacgagaacaaccaggatatctcggcgctggtgggtaaagtcgatatccgtaagctggagcatcacgcgcaaaacgacccggatgcctacggttattccggtgcgctgtgccgcgccaaccaggggattatggaatttgtcgagatgtttaaagcaccgatcaaagtgctgcatccgctactgaccgccacccaggaagggaactacaacgggacagaaggtatttccgccctgccgtttaacgggattatccttgcccactctaacgaatctgaatgggtgaccttccgtaacaacaaaaacaatgaggcgttccttgaccgtgtgtatatcgtcaaagtgccttattgcctgcggatctccgaggagatcaagatttacgaaaaactgctcaaccacagtgagctggttcatgccccttgcgcaccgggaacgctggaaacactgtcgcgcttctcgatcctgtcgcgcctgaaagagccggaaaactccagcatctactcaaaaatgcgcgtgtatgacggcgaaagcctgaaggataccgacccgaaagcgaaatcgtaccaggaataccgcgattacgccggggtcgacgaagggatgaacggtttgtcgacgcgtttcgcgtttaagatcctctcccgcgtctttaacttcgaccacgcggaggtggccgccaacccggtacatctgttctacgtgctggaacagcaaattgaacgtgaacagttcccacaggagcaggctgaacgctacctggagttcctgaaaggctacctgatcccgaaatacgccgagtttatcggcaaagagatccagaccgcctacctggaatcctattccgaatacggccagaacatcttcgaccggtacgtcacctacgctgacttctggatccaggatcaggagtatcgcgacccggataccggccagctgtttgaccgtgaatccctgaacgcggaacttgaaaaaatcgagaaaccagccgggatcagcaatccgaaagacttccgaaacgagattgtgaacttcgtgctgcgcgccagagcgcataacaacggccgcaatccgaactggaccagctacgaaaaactgcgcacggttatagagaagaaaatgttctctaacacggaagagctgttgccggtcatctcgttcaacgccaaaacctcaaccgacgagcagaaaaagcacgacgattttgtcgaccgtatgatggaaaaaggctatacccgcaaacaggtccgcctgctctgtgaatggtatctgcgcgtgcgtaaatcgtcttaaaacaagtgcccggtaacgcgcttaccgggccaacaaaatgtccggtacttacggacgctgcaagttggcaaatgcagtacgggggatatatgacctggtttattgaccggcgtcttaacggcaaaaacaagagcacggtgaatcgccagcgcttcttgcgccgttataaagcgcaaattaaacagtcgatctccgaggccatcaacaaacgctcggtgaccgacgtcgacagcggcgaatccgtctccatccctaacgatgacatcagcgaaccgatgtttcatcaggggcgtggcggccttcgccatcgcgtgcacccaggtaatgaccacttcgtccagaatgacagaatcgagcggccccaaggcggaggcggcggttctggcagcggtcaggggcaggccagccaggacggtgaaggccaggacgagttcgtctttcagatttcaaaagacgaatatctcgacctgctgtttgaggatctggccctgccgaatctgagaaagaatcagcaccgtcagctcaacgaatacaaaacccatcgcgcgggttataccgcaaacggggtgcccgccaacatcagcgtggtgcgttcactgcaaaactcgctggcgcgacgcacggcgatgacggcaggcaaacggcgcgaactgcgcgagctggaaaccagcctgaaagtggtggaaaacacggagccggcacaactgctggaagaggagcgcctgcgaaaagagatcgccgaactgcgggcgaagatcgaccgggtgccgtttatcgacacgttcgacctgcgctacaagaactacgaaaaacggccggagccttccagtcaggcggtgatgttctgcctgatggacgtatcaggttcaatggatcaggccaccaaggatatggctaagcgtttttatattctgctctatctgttcctgagcagaacgtataagaacgtggaggtggtctacatccgccatcacactcaggcgaaagaggtggatgaacatgagttcttctactcgcaggagaccggcggcaccatcgtgtcgagcgccctgaagctgatggacgaggtggtgaaggagcgctacgatccggcgcagtggaatatctacgccgcgcaggcatcggatggcgataactgggcggatgactcgccgctgtgtcatgaaattctggcgaagaagatcctgccggtggtgcgttactacagctacattgaaattacccgtcgcgcccaccagacgctgtggcgtgagtatgagcatctgcaagcgatgttcgataactttgcgatgcagcacattcgtgaccaggatgacatctacccggtcttccgggaactgttccagaaacagtcgtccaccagcaacgcatgacccaacagccagcgcacccgctggctgttttctttcagccctctccgtcccgtgctaatgtagcaagctacgtattggcaaatcacaggtgaaatcgttatgtctgatgacgtgatcgggacgacgacccatcagcggctaatcagcttattaaccgagcaggaggcgcgctttcgcgtggtggcgcatgaggccgttgggaaatgcgaagcggtcagtgaaattcgcgggaccgatctccggcagggtgcaaaagcactggtctgcaaggtaaaaggcaacggtgttaagaaacatattctggcaatcctcgccgccgatcggcaggccgatctgagccttctggccagtcatttcggtgggctaaaggcctctctcgccagtccggctgaagtggatgcgcttaccggctgcgttttcggcgccattccccccttcagctttcatccggatctgacgctggtcgccgatccgctgctgtttgagcgcttcgatgagatcgcctttaacgccggcctgctggaaaagtcggtgattatggatacccaggactatctgcgtatcgcccgtcctgaactggtgacgttccgtaaacaataaatacagcggctggctaacggtcagccgttttccagcagcagtacggaagcaatcaaaattatcgcgataataaaaaacgatgaggagataatcagcgtttcgacaaacataggatcgttcatgatgccctctgctttgcccatttgcctcttttttacccccgcacaatgacagttaaatgacaatgacgcgtccgtgaaatgactattttttcgctgaaacgattcgctgttgactatcctcccccgtataaagtcactgtttaaatactttatttgttaccggtatcacgaaaagaaatttacgtaaccccgatgccagatctcgcaattgttaaccttttcatcatggttaaccctgtttacggagcacctcaaaaataaaccttacactggcaaggtgaatacaatgaccgaaataattacccgtaaagaaaagatcagttatgggttaggcgatatggcgagccatattgggctggataacgtcattatttttctgacgttttactatacggacgtggtggggctacctgccgcattcgtgggcaccatgtttcttctggcgagaaccgccgatgccataatagacccggcgatgggctatatcgcagacaggacgcgcacgcgctggggcaaattccgcccctggatgctgtggctggcgctgccctttggcgcaagttgtctgctgacctacgccgtgccggcgtcgctcgatctgcacggtaaaatgattttcgccaccgtcagctataccctgatgatgctgatgtacaccgcaatcaatattccctattgctccatgggcgcggtgatcacgcccgacaacgatgcgcgaatttccctccagtcctatcgttttttcctggccacgctgggtggcgcgctgtcgacattctttatgatgccgctggcagagtttttaggcggcgatgataaattactgggctaccgctgggcgatggccattatggcgaccatcgcggtcatcatgttctggatctgcttcgccaatacgcgtgaacgtattaaggctcccgctacccacaataattatcttgcggaactgcgggatttattacgaaacgaccaatggcgggttgtcgccgtcctggtattaaccaacattggttttggcgttattcgccttggcgcaatgatgtatttcgtcacttattatctcggtagcgcgagctattttatgtggatgctcggggcgcatattctcgggaaagccgcaggcagcgcgctggccaaacgtctgacgcagaacgtcagcaaagtacagatgtttggatactgttccgtactggcgggggtactcagcatcgccctgttctttgcgcctaagtcggtgcttattctggtgcccatgacgtttatcgtctccaccctttaccaggccaccaccacgctgatgtgggtaatgatggcggacgtcgccgattacggcgaatggaaacaggggaaacgcatggacggcgtgatcttctccaccttcctcgccgtactcaagctgggaatggcgatcagcggcgcgattgttggctggacgctgggcttaagcggctatgtcgccaacgccccggaacagaccaccacggccatgtactgcatcatcgccctcttcaccgtcgtgcctggcgtcttgtcactctgcgcgtttgccacgctgcgctggtacaagctcgacgacagcacaatgcaatccatccatcttgccaaacaccctgtttagaaggacgcgttttccatgagtgagctgatccaacattccaacagtatcgaatggcgttttgaacgccagaccctgcgtattgaaccgtggggtgaaaacagcctgcgcgtcagggccacctgctccccggcttttgatgacgccttacaggcactgttgcccgccgccccttgccaggctgagattgtcgccgaagcggaaagcctgacgctgcgcaacggcaatattaccgcgacgctgaatcttaaaggtcagctggccttctacaatcagcgcggcgaactgctgctggaagagatgtggcgccagcgttcaacggtgggtatcggtgccagcgagaagagccaggataaatatgtcagcgccctgaagctggatggccgcgaatttaagccgctaatgggggggaaatatcagctcaccgtccggtttgaatcgcgtccggatgaacgcatctatggcatgggtcagtatcaacagccgtggctggatctgaaaggctgtacgctggaactggcacagcgcaactcccaggccagcgtgccctttatgcagtccagccttggctatggcctgctgtggaacaacccggcgattggtgaagccagctttgcaaaaaatcagacggaatggcgcgcccgcgtcacaggagaaatggactactggatcaccgccgccgacacggtggcggatatcacccgccagtatgtgaaagccaccggtactccgccctccgccccggcgtttatcagcgggctgtggcagtgcaaattacgctaccgcacccagcaggaggtgctggaggttgcgcgggagtatcgccgccgtaatctgccgctgtcggtgatggtcatcgactttttccactggccgaatcagggcacctggtgcttcgaccccgtagactggcccgatcctgaagggatggtcgacgagctgcgcgaaatgggtattgcgctgatggtgtcggtgtggccaacggtagaggcgcgcagccctctctacccgctgatgaaagccaaaggctggctggtcagcagtgaacgtggcgtgcaggtcaacctcgattttatgggcaataccaccttctttgatgcgacccatcctgaggcgcggaaattcgtctgggatacggtgaagaaaaattactacgacatgggcattaagctgttctggctggacgaagcggagccggaataccgcgcctatgattttgacaactatcgctaccacgccggtccggtgctggaagtgggcaatcgctacccgcgtgactttgcgcagggctttttcgatgggctccaggcaaatggtgaaaccgacattgttaacctggtacgctgtgcctgggcaggcagccagcgcttcggcgtgctggcgtggtcgggtgatgtccactcctcgttccatgcttttcgcaatcaactcgccgcgggactgaatatggggctggcggggatcccatggtggacaaccgatatcggtggcttccagggagggaacgttaacgacccggcgttccacgaattgctgatccgttggttccagtgggcggtgtttacaccggttctgcgcatgcacggctatcgcgaaccgcagatccagcccccggagcgctaccgtgacggcattcctcagtgtaacagcggttcgcctaatgagctgtggagttacggagaagagaattacgccatcatgcagcactggcttaccgtgcgcgaaaccctgcgcccgtatattgacgcgttgtaccagcaggctcatctgtacggagacccgctcatgcgtccgctgttctggcactatccgcaggataagcagagctgggcgtgtgaagatcagtatctgtttggcgaagatctgctggtggcgccggttatgcaggccggtcagcgtgagcgcgatgtctggctgccgacgggcaatagctgggtcgctcttaacggtgagcgctacgccggtggggagcatatccgggtgcctgcggcgctggaaaccatcccggtatttatccgcgaagggagtccgcttatccagcaactggtggactgacgtcaggcaagtgcccaaaaatagacaattttttcagtaaagcctgcctgccgtcgcgtttgcgcgtaaagtaagcaggcttactatttttggcaaggatcccgtcatgttcgaccctactctgctcatacttctggccctggctgctctgggttttgtcagccacaacaccaccgtcgcgatttccattctggtcctgatcatcgttcgcgtcacaccgttgaataccttcttcccgtggatagaaaaacaggggcttaccatcgggatcattattttgaccatcggtgtgatggccccgattgccagcggaacgctaccggcctcaacgctgctgcactcttttgtaaactggaaatcgctggtggcgattgcggtgggcgtttttgtctcgtggcttggcgggcgcggcgtgacgctgatgagcagccagccttcgctggtggccgggctgctggtaggcaccgtgttaggcgtggcgctgtttcgtggcgtgccggttggcccgctgattgctgccggtctggtttcgctgtttatcgggaagtcatagtcaggcttgcgatatagcgggcgggcgtctgtcccagtcctttcttaaacatggtgatgaaggcggtggtggagtcataccccagcgcctgcgccgcctgctggaccgacttcccgccgattaaaaactgcaatgcgacaatcagctggagctggtgccgccagcgacgaaagcttaagccggtctctttcaccaccagccgcgccagattgcgctcgctcatggcaaagtggctggcccactgcgccagcgtctgccaggcggcaggttcgtttgccatggtctcactcatcaggcgaatttttggatgcggagataccggcagctgtagatgctcctgcggttgcagaggcagttcatcaaacaggacgtctaccaaccttccggtagcgggaagaggcagttcttcccgtgacctgtctgcaagcgccagcaccagctcccgcaccagaggcgatattttcagcgtacaggtacgcatcggcaattcgagcgcaccgggttcaataaacaacaggcagagctgtgcgccgggcgtcgccttgttgctgtgcggcgtttgtcccgggatccacaccgcatactggggcggcaccatcagcatcgcgttctccacttcacaggtgatcgctccccccagcgccataatcagctgccctttgcggtgctgatgcagcggaatatattgttcctgtgccaccacgcggatgcgaaaggccaccgccgcgtcgtgctggctatcgggatcgtagccgtcgagccccagtccgtacataaagttgtccgatattagcgataaactgtcattttagcctgatttcaaccacgacttaaatcggtatggtatgcgctcgcctgaacgtaagagacaataatgactactgctattcaaccttccgggaaacagggtgtgctgctgattgcaggcatcctgatgattgccacgacgctgcgcgtcacctttaccggtgtcgcccccctgctcgacactatccgacaggactatggcttaagcacggcgcaaaccggcctgctcacgacgctgcctctgctgnnnnnnnnnnnnnnnnnnnnnnnnnnnnnnnnnnnnnnnnnnnnnnnnnnnnnnnnnnnnnnnnnnnnnnnnnnnnnnnnnnnnnnnnnnnnnnnnnnnnnnnnnnnnnnnnnnnnnnnnnnnnnnnnnnnnnnnnnnnnnnnnnnnnnnnnnnnnnnnnnnnnnnnnnnnnnnnnnnnnnnnnnnnnnnnnnnnnnnnnnnnnnnnnnnnnnnnnnnnnnnnnnnnnnnnnnnnnnnnnnnnnnnnnnnnnnnnnnnnnnnnnnnnnnnnnnnnnnnnnnnnnnnnnnnnnnnnnnnnnnnnnnnnnnnnnnnnnnnnnnnnnnnnnnnnnnnnnnnnnnnnnngcaggcgtcgcccggcgcctgggcatggagcgcagccttttttatcgctctgctgctgatttgcatcgggattggcgtacgttcgctgccgtcggcctcgctgctgtttatcggtacggcgatcgtgggctgtgggattgcgctgggcaatgtcctgctacccggcttaatcaaacgtgattttccgggccaggtcgcaaaactgacgggggcttattcgctgacgatgggggccgctgctgccgcagggtcggcgctgatcgtcccactgtcgctggggagcgctggctggcacggggcgctgttgatgctgatgttcttcccgctggtggcgctgctgctgtggttaccgcaatggcgccacagaccggctgccaccctgaccggagcgggcgcgttgcacaatcgggctatctggcgctcggcgctcgcctggcaggtgacgctttttctgggcattaactcgctgatttactatgtcattatcggctggttacccgcgattttgcttagccacggctacagcgaaacgcaggctggctccatgcacgggcttctccagctggcaaccgcggttcccggtctcgccattccgctgatcctgcaccgtcttaacgatcagcgaggcattgccgggcttgtcgccctgatgtgcgccgtcagcgcggccgggttctggttcgtgccggggctggccgtcgtctggacgctggtgtttggctttggctccggcgccaccatgatcctcggcctgacgtttatcgggctgcgcgccagctcggcccatcaggccgcggcgctctcgggcatggcacagtcgattggctatcttctggcggcctgtggcccaccgctgatggggaaaattcacgataccgccggagactggcgcattccgctgctcgcctgcgccctggccgcggtggtgatggcgttatgcggtatgcttgccgggcgtgaccgggagatcacaccccgctgacattcaaggcagacccggaggtctgctttttttatccctgcgccgcccgcagcatggcctgtaccagcacgaccggtcgcccttgcagcgcggcccgctcatgctggaacagggtgatgacaaagaaaggatgggttaccagctctgccgcgcggatctcaccctgctcgtcccagcccgttacgcgcatgtcgccccgctcaagctggtcggcaaactcaggtgagacgccgtaattgcagtgatatccctcctgaatttccggcttgccatacgctttagcaatcagcgtgttattccgcagctcgatcgcatcggttttttccaccagcgagcaggtcagcggggcaattaccatccttccctcggtgtcggtttcggcatggcctgcatcgtgccagcccagtacattacgcgcatactcaatcagcgcatgctggaacccgccgcaggtgccgagaaaggggatgctgttctcacgcgcgtaacgggccgcaataaacgccgcctcggtgtttttatacgggcttgccggtaccagccagatggcatcgtacccgaccaggtcttcggggctggtcagctcaggcgtggcgagccagtcataatcagcggtgagctccagaaccgcagcggcgtcgtcaatcgccagcgggatcgcctggtgcgcaataacatcgggattgtaatcaccaaccagcgcaatgcgcagcgtcgttttaaccggggagagttccatcagagattccttatgccggaggattttcagataacataaggaacctcagactaccgatcttttgcaattatcacaataccttaaattgggtggataaaagccgggtgctatagtgttcttgcagaacgtcgtaaggaaatgaggaggacccatgattcaatgtaaacgcgtgtatgagcaggcgacctcaaaagacggttaccggatcctggtcgacagactctggccgcgcgggataaaaaagaccgacctcgcctgtgatgagtggtgtaaagcgctaacgccgtccagcgaactgcgaaaagcctttcacagtgaaacgatagatttcaccgcgttcagtgaagcctatcgtaaagagctggcgcagcatccggatgaaggcaaacgcctggcggctctcgccaaacagcagaccgtgacgctactctatggggcgaaaaatacggagcagaatcacgcgcaggtactggcggactggctgcgtaaactgtgattaaccgatcgccagctcatccacgttgtgtggcatctcgtcgggagtaagcggcatcagatgttccgggcgaacaaacgcaaaaccgtgctgattatcaaaggcgtaaacatcaccggtgaccagccacagcgcacgcgctgacgtggcgggtaattgcgtcatgacgccgttaaccgggttcacaaaacgctggcccggctgacagaggccaaacagctcgacggatttaccgatatttcgacggcctgccgccgtacgcgcacccacgatcatcgccatgctgcccggttttaactgaaacatacttcttctcgcaaacgtactgccagaaactggctaagaataatcctaaagagaagtgtatcgcagttttattgccgttgtcatctggtcggttgcgggtgatcgcggcggtagagatcccattcatcgatcacttccccgcctggcaatttgcactcggtacgtacgccctgcgggctttgaacagggatttgctctccccctttctccagacagtacactgacgccgggtttgccataccaatagcgtgcggcggttgaggcgcatcaggaggggttgtctttgttgagcaggcggccagcggtaaaaccagcgccaggagaagatatttcattatcatgatccttcagggtgtaaaaacgtcagagtaacgggtcatcgccgttttctccatgatttctccattaaacctgcacgattcccccttatagtgatgcctgttctcacactgaccagagaacatcattccgtaatcaagatgttttgccccgatctcaacatcggggctttttttagcctctccctcatccgcttccagaagaatctataaaattaatcctgttcatgttttactatgaccggagtctatattttcagcataacatgcagatacagaggtcttctgcatgggagtcaacctgcctcatgtcagatatcattcttgcccgtgtttcagaaaccctctccactgaacaatctctcgacagtctggtgcgtcagctactggaaatgctggaaattgtgacggatatggaatcaacctacctgacgaaagtcgatatcaatgcgcgtttgcagcacattttatatgcccgtaacagaaagcaaatgcacatcccggaaggtttcagcgtgccctgggacgaaacactgtgtaagcgcgccatcgacagcgacacgttgttcagtaacgaggtgcccgaccgctggccggagtgtgaagcggccaaagcactgggcattacaacctatatgagcgtgccggttcacctggctgacggttctctgtatggcacgctttgcgcggccagcaccgcacagaaacagttcagcgagcgtggcgagcaggtgatcaggctctttgccggtttaattggtcagtacattcagaaagagtcgcttgtgcttcagcttcgcgaagcaaatgcggcgctcattgcccactcttacaccgacgcccttaccggcctgccgaatcgtcgcgccatttttgaaaaccttaccaccctgttctcactggcgcgccatcttaaccgcaacgtcatgatggcctttattgacctcgatgatttcaagcgaatcaatgaccagtacgggcatgaggcgggcgatcgcttccttgtacaggtcggcaagcggctgactcacgagcaaacgcaggatgagattattggccggctcggcggcgatgaatttctggttgccagcctgagtcacagcgatgatggcgacgccagcaaaggggtcaacgcaatcaaaacccgcctcaatggtcttattgcgggcgaatacgggttaggtaatgccactattctttatcccggcgcaagccttggcgtcgttattgttgatcctcaccgcactgatgaagatagcgccctgcgcaccgcagacctcgcgatgtatcaggataaaaaaggaaaaagcaaaacaggctttgtcgcgttagattaaaatcgtacactctacggccttatacaaactcaaacaggtgatggcatgagaatagggatcctctttccggtggttatttttatcacggcggtggtgtttttaggctggtttttccttggtggttacgccgcgccgggggcttaaatgagaaaaacgaccatcatcatgctgattgtcgccatcgtggccgtcgccggtacgcagttgggctggtggtaacgcccaaagtaaaaaggccgccgtcaggcagccttttttaactcaggtcagatttagcttttgatttttctgtagataaacagaacaaccagcgcgccaatcaccgcgacgacaaagctgccgaagttgaagccatcaactctgccaaagccgaacagggtactgatccagccaccgacgactgcacccacaatccccagaatgatcgtgacgatgaaaccgccgccatctttgcccggcataatccacttcgccaggatccccgcaatcagcccaaagataatccaggataaaattcccatagctttcctctctgtatggtttttgtcattaaatcaacgacacagaaaaggatagcacaggatctgagaaaggaaatttgtgataggaatcacacggttcgtttgattaaaatatgagcagtaaaaaaatgccgttccacactcatcgtggggttgcatcttttactgagaaagattatctttctcattactgaatagttgagcaaatcactcaggtattcagtacgacattgctcacattgcttccagtatttcttgcccactcttgagtgggctttttttttgcccgaacccaccaaaatctggcgtttcttcagtggaggtgaaacgctattctctgtggctactgaacaacaaaaacgttgataacatgaacgtatcaagcaagtttgtcatctgccttaatcttgtttctgccagtacgttactgctactgctctcaacacggtttgagtggttctgagatgaaaggagcctggcatggtggctttcctttcgattccgtgcagcctcaactctcatacttgtagcttttatgacctgtgttaagatccctgcacctcaggacgtggtgggacaacaggaaaatgaagaaggccattgccgttgctatcatctcaacctttatggtcgtcctgtcgctgtatgcggttaacgccattatcgctgagcagcaaaagaaccggcagagggagatctcccacacgctcttaagctattctgaagagttaacgcaaaatatcgccagtacgcttataaatacctccgcgcagggatgcgatagcgccagtctgaacgtctaccgaaaattaaagatgcgaagtctctatttcgccgatgtggggtttattgaaaaggggaaaatcacctgcaccgcgttttggggcaagctggcaaatcccatcgcccttccctctgagctgcataatacccagaacggattcagcctggcgcagttttcgcagaaagatttctttgtcggcaatgcgacaatctataaccaccttattatcttcacctcccgttcagcctacgataaatttgcccccgttaccgccaactattcgcttcgttcttccactaaagatttcggccgcacctttttcaccgttacgccgccatcagaaaacttcagccgcttacagtctctgttatttacgctggctgtgacagagtgcagtacacgctgggatttgtgcgttaccgtcacacaccatgatgccggactggcttcgctctcccacgtagtgatggtgcttctgtgcttgtttttatactttatctgggtatccctgacgctgttttctcttcgactttatgaagaccgacgttctctggaacgaacgctggtcaaagcggtaaaagcgaataccatcagcgttcattttcagcctgttattcgggttgctgataagaaaatcgtcggggttgaagtgttatcaagatggcaggataacaatcacaaagaggtttctcctgagctgtttatcccgttaattaaaaaaattggcctgtataacgtttattatcagaacatgataaagaaatccctggcggaaattgccgcgctggccgctgaacatcagttaatgatttcactgaacgttggccggacggaaattgaagacggcaaattcctggcggtattacgtcatgaatgctcagagaacgcgattcccttatcgttaatcaaagttgagttatccgaaaatggcgtttccaccgcggccatccttgaagagttttgtgaggagcttaaatcggcaggcgtcaaaatttcaatagacgattttggtgtgcaaaactctaatctggccaggctatcaaatctcaaatatgacgaaatcaaggtggataagtcgttagtggacggcatcagcgagcactataaacaggatatcctggtgatcttcagcgacgcgctcgctaaactgcacaaaaccctggtttttgaaggggttgaaagcgaaacgcaatatcagttcatcgcgcagagataccccgatgccctcgtacaaggctggtacttttcaaagtcgctaacccggcacgacctcgccaggctgctggcagactcagcgcgatgacgcgttattcattgccccactgattcaggaagttcgcaatatcgtcaatgcgcgcttcgtctatctccgcctggacagccatctcccgctgcgcctcttcactgatttcctcattgttgtataagcgagtgagcagcagctggaaatagtgtgccagcggcgtacgttctgcctcttctaccggtttcgccgtttcagtcgcatactcgtcgacgatgtcataatacttgagcgggatatcatggttcatagcgttgtttccgtcttgtgtgcataaaaaacgggaaccctcaggctcccgttgtcatttaacccagcgagtggattacatgttcgcgataatcgcgtcgccaaactctgagcatttcagcagtttagcgccttccatcagacgttcaaagtcataggtgacggttttcgcgttaatcgcgccttccatacccttaacgatcaggtctgcggcttcgaaccattccatatgacgcagcatcatctctgcggacagaatgatagagcctgggttgactttgtcctggcctgcgtatttaggtgcagtaccgtgagttgcttcgaacagggcgcactcgtcaccgatgttcgcgcccggggcgataccgataccacccacctgtgctgccagcgcatcggagatgtagtcaccattcaggttcatacaggcgatcacgtcatactcagcaggtcgcagcaggatctgttgcaggaacgcatcggcaatcacatctttaatgatgatctctttaccggtgttcgggttcttaattttctgccatgggccgccgtcgatcagttcaccgccgaactcttcggtcgccagctggtagccccagtctttgaacgcgccttcggtgaacttcatgatgttgcctttgtgaaccagggtcacagagtcacgatcgttggtgatagcgtattcgatggcggcacgcaccagacgcttggtcccttcttcggagcatggcttgatgccgatgccgcaatgctcagggaagcgaattttcttcacgcccatctcttcgcgcaggaatttaatcactttttctgcatcagcagagtccgctttccattcgataccggcgtagatgtcttctgagttttcacggaagataaccatgtcggtcagttccgggtgcttaaccgggcttggggtgccctggtagtaacgcaccggacgcagacacacatatagatccagttcctgacgcagcgccacgttcagggagcgaatgccgccgccaactggcgtggtcagagggcctttgatagcaacgcgatagtcgcggatcaggtccagcgtttcggctggcagccagacgtcctggccataaacttgagtcgatttttcaccggtgtaaatttccatccaggaaattttacgctcgcctttgtaggctttctcaacagcggcatcaaccactttcagcattgccggggtaacgtctacgccgataccgtcgccttcaatgaacgggataatcgggttgtgaggaacgttaatcttgccgttttgcagggtgatctttttaccttccgccggaacaactactttgctttccattaacctctccttcgagcgcttctggttgttactgatcttatgttaataaattgtaatgagccttccgatagtacctgattgtccgacgccatgaaaggtcttcgttattaggctataatgcggcaattgataacgcctgaaaataccatgacgaaaacttcttttagaaaacaccgggttgagcgattcagctcacgacaagccaccagaagaacgccagaaccccagccaacgcgggtcatactgttcaataaaccctacgatgtattgccacagtttaccgacgaggccgggcgcagcacgctgaaggactttattcccgttcagggagtgtacgcggcgggacgtctggatcgtgacagcgaagggttgctggtgctcaccaatgacggcgtgctccaggccaggctcactcagccgggcaagcgtaccgggaaaatttactttgtgcaggttgaaggcgagccggacgacgcgtcgctggcaaaactgcgtaacggcgtaacgctgaacgacggtcccaccctgccggctggtattgagcgcgtgaatgaacccgagtggctatggccgcgcaacccgccgattcgtgagcggaaatccattcccaccagctggcttaaaatcaccctttatgaaggccgcaaccgacaggtcaggcgcatgactgcgcatgtgggcttccctaccctgcgactcattcgctatgccatgggcagctacacgctggactcgctggcaaacggggaatggcgggatgttacccctaaggagaactgatgtttaaacctcatgttacggtcgcctgcgtggtccatgcgcaggggaaattcctggtggtggaagagaccatcaacggcaaagcgctgtggaaccagcctgccgggcatcttgaagccaatgaaaccttacgccaggcggcagcccgtgagctgtgggaggagacgggtatccgcgccgaaccgcagcattttatccgtatgcatcagtggatagcgcctgaccagacgcctttcctgcgcttcttattcgccgttgaacttaacgaaacgtgcgccactgaaccgcacgacgacgatatcgatcgctgcctgtgggtgactgccgaggagatcctgaacgcgccaaacctgcgttcgccgctggtggcggaaagcatccgatgctggcagtctgcggcgcgcctgccgctggatatcattgcagagtttaactggccgtttacagagggtgtcaatggtgggggggcgtgatagaatacgccgccttgaagttcaatgtcgtgagtattccatgtcagataacagccagaaaaaagtaatcgtcggcatgtccggcggtgtcgattcctccgtttccgcctacctgttgcagcaacagggctataaggtggagggcctgttcatgaagaactgggaggaagacgatggcgaggaatactgcactgccgctgcggatctcgccgatgcgcaggccgtgtgcgataagctcggcatcgaactgcacaccgttaactttgccgcagaatactgggacaacgtttttgaactcttcctcgaagagtacaaagcgggccgcacgccaaacccggatatcctgtgcaacaaagagatcaaattcaaagccttcctggaattcgccgcggaagacctgggcgcagactacattgcgaccggccactacgtgcgtcgcgcggatgtgaatggcaaaagccagctgctgcgcggcctggacggcaacaaagatcagagctacttcctctatacgctgagccacgaacagattgcccagagcctgttcccggtcggcgagctggaaaagccggaagtgcgtaagattgctgaagatctggatctgatcaccgcgaagaaaaaagactccaccggtatttgttttatcggcgagcgtaaattccgcgagttcctggggcgctacctgcctgcacagccgggcaaaatcgtcaccgttgacggcgatgagattggtcagcaccaggggctgatgtaccacactctcggccagcgtaaaggtctgggtatcggcggcaccaaagagggcagcgaagatccgtggtacgtggtcgacaaagacgtcgaaaacaatattctggttgtggctcagggtcacgaccacccgcgcctgatgtccgttggactgatcgcgcaacagctgcactgggtcgatcgcgagccgctgaaaggcacgctgcgctgcacagtgaaaacgcgctaccgccagacggacatcccttgcaccgtaaccgcactgtatgacgatcgcattgacgtgcgtttcgacgagccggtttccgccgttacccctggccagtctgctgttttctacagcggcgaaatttgcctcggcggtgggatcattgaacagcgcctgccgctgcctgctgtttaaaccgtttgcacacataaaggagaccgtgtggcgaagaactattacgacatcaccctggcgctggcgggaatttgccagtcagcccgtctggtgcaacagctggcgcatcagggtcattgcgacgctgatgccctgcacgtttcactcaacagcgttatcgatcttaaccccggctccacgctgggcgtctttggcggcagtgaaaccaatcttcgtctcggtcttgaaactctgctcggcgtgctcaacgccagcaaccgtcaggggttgaacgcggaactgacccgctacaccttaagcctgatggtgctggaacgtaagctgaacgcggcaaaaggcgcaatgaataccctgggcgaccgcatcgccgggctacagcgccagctcgaccactttgacctccagtctgagaccctgctcagcgcgatggccggtatctacgttgacgtgattagcccgctcggcccgcgtattcaggtcaccggttcgcctgccgtattgcaaagcccacaggtacaggcgaaggtacgcgcctcgctgctggcaggcatccgtgccgccgtgctgtggcaacaggtcggcggtggccgcctacagttaatgttttctcgtcatcgcctgacgactcaggcaaaacaaattcttgctcattgttaacctcccggagttgcgaattatggaattatcctcactgaccgccgtatcccctgtcgatggacgctacggcgataaagtcagcgcgctgcgcgggatcttcagcgaatatggcctgctgaagttccgtgttcaggttgaagtacgctggctgcaaaagctggccgcccagacagcaatcaaggaagttcctgcttttgacgcaaaggcaaacgattaccttgataaaatcgttgctgagttcagcgaagaagatgccgcgcgcattaaaaccatcgaacgcaccaccaaccacgacgtgaaagcggttgaatacttcctgaaagagaaagtagcaagcgtccctgccctgcacgcggtctctgagtttattcacttcgcctgtacgtctgaagatattaacaacctgtctcacgcgctgatgctctctaccgcgcggaaagaagtggtactcccttactggcgtaaaatcattgatgcggtgaaagcgctgtccgtggaataccgcgacattccgctgctgtcccgtactcacggccagccagcaaccccatccaccatgggtaaagagatggcgaacgtggcgtaccgcatggagcgccagtaccgtcagctggagcaggttgagatcctcggcaaaatcaacggcgcggtgggtaactacaacgcccacatcgccgcgtacccggaagtggactggcaccagttcagcgaagagtttgtgaactctctggggatccagtggaacccgtacaccacccagattgagccgcacgactacatcgccgagctgtttgactgcattgcgcgcttcaacaccatcctgatcgacttcgatcgtgacgtatggggttacatcgccctgaaccacttcaggcagaagaccatcgccggggaaatcggttcgtccaccatgccgcacaaagtgaacccaatcgacttcgaaaactccgaaggtaacctgggtctggcgaatgccgtgttgcagcatatggcgagcaagctgccggtatctcgctggcagcgtgatctgactgactccacggtgctgcgtaacctgggcgtaggtattggctacgcgctgatcgcctaccagtccaccctgaaaggtgtgagcaaactggaagttaaccgcgaccggctgctggacgagctggatcacaactgggaagtgctggcggagccgattcagaccgtgatgcgtcgttacggcatcgaaaaaccgtacgagaaactcaaagagctgacccgcggcaaacgcgttgatgctgaaggtatgaaacagtttatcgacggtctggcgctgccagaagaagaaaaagcgcgcctgaaagagatgaccccggcaaactatattggccgtgccatcgctatggttgacgagctgaagtaatcgcccttccccctttccacccggaaagggggctgctttacatcatcgagccgacatttcacgtcacattatctgttttgccgggattagagcctgccgtcaggctgaatgttattttttgccgtggaataactttccggaatataccgttttaagccgaacgggcacagtttgaactggcacggggtttcagccgtgcacaggcgatccatctcctgtcggttgcctggacacgcgtttttctgtttgaaccccatccagcctattgatgtaaagggcattgcctgcgctatccatactctacgccgccgatcgttaatcaggatcccctggtttgaagtggtgatgatttcacctgtacgaacgtaataatctccctttaaccacaggatataattcaggccatactgtgtttcaactttgcaaaagatggttccgctttccgggctcgcaatagtctcaacaaccttccattccataaagtcctctttactcgctatattgctgttttgttgtgtaaaaatgctgcttttctggcacatcttatgcaaatctaatttcgtatcataaaataagcgtagacaaagccaggcatagtgagaacatccttacaaaaaaaagggcaatatttacaaaactggcgtgcccgtgctgtccaaaaagcgactcgccttcaacagttcataaacggatggctgttttatcgggattgcgaaagcttgcgaaaacaagtcagtttatattacccgcgcctgctgggggcgcatgaggcttacgtgagttgggtgggtgatatgaaccaggctcaggtcaacatacttaataatcaggtgcctggcgtcatccccccctgtgttcgggagcatgaaaaaatcattaatttcatcgcgctggtgtcaacctgaataatcagcgttaaactattcataccatttataaagggagaaatgatgatgcgcgtactggttgttgaggataacgcattgctacgtcatcacctgaaagttcaacttcaggagatgggtcatcaggtggatgatgctgaagacgcaaaagaggcggattattatctcaatgaacacctgccggacatcgccattgtcgatttagggctgccggatgaagacggattgtcccttatccgccgctggcgtagccatgacgtttccctgccggtgctggtgctgactgcccgcgaaggctggcaggacaaggttgaagtcctgagcgctggcgcggatgactacgtgaccaaacccttccatattgaagaagtcgccgcgcgtatgcaggcgctgctgcgccgcaacagcgggctggcgtcacaggttatctctctgccgccgttccaggtggacctctctcgccgcgaattttctattaatgatgaagtgatcaagctgaccgcattcgaatacaccatcatggaaacgctgatccgtaacaacggtaaagtggtgagcaaagattccctgatgcttcagctctatccggatgccgagctgcgcgaaagccacaccattgacgtgctgatgggtcgcctgcgtaaaaaaattcaggcgcagtacccgcatgacgtgatcaccaccgtgcgtggtcagggctacctgttcgaattacgctaaatgaaagggatattgcgccacattttacccctttcgctgcgggttcgctttttgctggcaaccgccgccgtcgtgctggtgctgtcgctctcttacgggatggtggcgttggtcggttatagcgtgagcttcgataaaaccaccttccgcctgcttcgcggcgaaagtaacctgttttataccctggcgaagtgggagaacaaccgaatcaccgtcgagatgccggaaaacctgaatcagcagagcccgacgctggcgctgatctatgatgaaaaagggaaattgctgtgggcccagcgcgatgtcccgtggttgaaaaagcgcatccgtccggaatggctgaaaaccaacggttttcatgaaatagaagccgacctcaactccaccagcagcctgctgcgtgacgatcgcgccttacagatcaagcttaatgagatccgtgccgaagatgacgacacggagatgacccactctgtggccatcaacctttaccccgccaccctgaacatgccgcagttaaccattgtggtgatagataccataccggttgagctgaaacgctcgtatatggtctggaactggtttgtgtatgttctggctgccaacctgctgctggtgatccctctcctgtgggttgctgcgtggtggagcctccgcccgattgaatcccttgccaaagaggtgcgcgagctggaggaacatcaccgcgagaagctcaacccggagaccacccgtgagctgaccagcctggtgcgcaacctcaaccgcctgctgaaaagcgaacgtgaacgctacgacaagtatcgcacgacgctcaccgaccttacgcacagcctaaaaaccccgctggccgtgatgcagagtaccctgcgttccatgcgcagttcgaaaatgagcgtggatgacgccgagccggtgatgctggaacaaatcagccgtatttcacagcagatcggctattacctgcaccgcgcgagcatgcgttccggaagcgccctgttgagccgtgaactgcacccggtagccccgctgctggataacctcacctctgcgctgaacaaggtgtaccagcgtaaaggggtcaacatcagtctggatatctcaccggaaattagctttgtcggtgagaaaaatgactttatggaagtgatgggaaacctgctcgataacgcctgcaaatattgtctggagtttgtcgaggtgtccgcgcgggtaacggataacgaactgcatattatcgttgaggatgatggtcctggcattccccgtaataaacgcgaagtggtgttcgatcgcggccagcgcgccgatacgctgcggccaggccagggcgtcggattatccgtcgccagggaaatcgtcgatcagtacgagggcaagattgaaaccggagaaagtttgctgggcggtgcccgtatggaagtcatttttggccgccagcatcccgtatcgaacgatagttgacccgaaatgtgaaaaatacgcggatctcgcagtcagggggcggtgcttccgttataatccgtctcagtaagagcctgcggaatacaaaaatatggattatcaattaacgcttaactggcccgaatttattgaacgttactggcaaaaacgcccggtcgttcttaaacgcgggatcagcaattttatcgaccctatttctcctgacgaactcgctggtctggcgatggaaaacgaggtagacagccgtctggtgagccaccagaacgggaaatggcaggtcagccacggtccctttgaaagctacgatcatctgggcgaaaacaactggtctttactggtgcaggcggtcaacaactggcacgaacccaccgcagccttaatgcgtcccttccgcgccctgccagactggcgaatggacgatctgatgatctccttctccgttcccggtggcggcgtgggtccgcatctggatcagtacgacgtgtttatcattcagggtaccggtcgccgtcgctggcgcgtgggcgaaaaagtgccaatgaagcagcactgcccgcacccggatctgcttcaggttgatccgtttgaagggatcattgatgaagagctggagccaggtgacattctttatatcccaccgggcttcccgcatgaaggttattccctggaaaactcgctgaactattcggttggtttccgcgcgccaagcgggcgcgagatgatcagcggatttgctgactatgttttacagcgtgagctgggcagctaccgttacagcgatccggacgttccggcgcgtgagcacccggcggatattctgccagaggagttggataagctgcgcgggatgatgctggatctgatcaacgaaccggagcacttcagacagtggtttggcgagtttatcagccagtcgcgtcacgaactggacgtcgcaccaccagagccgccgtatcaggcagatgaaatttatgattcgctccagcagggcgataagctggttcgtctgggcggattacgcgtactgcgcattggcgaagaggtattcgtcaacggcgagcgcctggactctccgcatcgcccggcgctggaagcaattgccagccatatggtgctgactgcggataccttcggcgacgcgctggacgatccctccttcctcgccatgctggccgcgctggtgaacagcgggtactggttttttgaggactgagccatgatgtttgccgggtggcggctacgccttacccggcctacatattgcacccgtaggcccggtaagcgaagcgccaccgggctttgttttacttccgctcccccgccgcaaaatcctcaatctcacccgcccagtctgccggatataacccttcccgcacctcccgatgaaacgttgaatatggccagtcgacgactttcccgacatagccatgcttcagcggattgatgtagacgtaatccatataccgccgataatcctgctcattgcgaatagtgtgctcccagaaacgcggttgccagacgtggcgcatttcaatgttgcggctaaacgtttttttgatgtcgcgccagcgcgctgaaaagtcactgtctccttccggcagggtccagatacagtgcatatgttcaggcaggataacccaggcgttaatggtgaagggcttcgcacgcttaaccgtggcggtagcggaacgcaggctgtcgatgtggcgagtaagtaaatcgctctggcggttttgcagattgacggtgaaaaaccaggtcccaccggggatgtagtggcggcggtagtttgacattggcactccttgcccattgcccggtggcgctgcgcttaccgggcctacgatcgaaatgtaggccgggtaaggcgtagccgccacccggcataaaacattaccgcttcgcggttaactccgctatccgcacgatcacctgcaccgctttctccatcccttccagcgtcacgaattcatgcttgccgtggtagttatatccaccggtaaacaggttcgggcacggcaggcccataaacgacagctgtgaaccatcggtaccgccacggatcggtttcatcaccggctcgatgtcacaatcgcgcatcgcctgctgggcgatatcaagaatatgcggatgctccatcaccttatcgcgcatattgtaatagctgtcttcgatgatgagttcaatatagcaatccggatgtagccccttgccgacctttttcgcgatctccatcatcttacgtttgcgtgcttcaaaggctttgcggtcgaaatcgcggacaatatagtgcatctgcgcgctgtccacggtccccttcgatgctggtcagatgatnnnnnnnnnnnnnnnnnnnnnnnnnnnnnnnnnnnnnnnnnnnnnnnnnnnnnnnnnnnnnnnnnnnnnnnnnnnnnnnnnnnnnnnnnnnnnnnnnnnnnnnnnnnnnnnnnnnnnnnnnnnnnnnnnnnnnnnnnnnnnnnnnnnnnnnnnnnnnnnnnnnnnnnnnnnnnnnnnnnnnnnnnnnnnnnnnnnnnnnnnnnnnnnnnnnnnnnnnnnnnnnnnnnnnnnnnnnnnnnnnnnnnnnnnnnnnnnnnnnnnnnnnnnnnnnnnnnnnctcttcggcgggcacttccgcatgaatacgcgcagccagcgacagcgcattcaccatcacccctttcgcagaccccgggtgcacattattcccaacgattttgatcgtcaccgatgccgcgttaaagttttcatactccagttcacccacgccgccaccgtcgacggtgtaggcccactgcgcgttaaacgcctcaacgtcaaagtgtttcgcgccttttccaacctcttcatccggcgtgaaggccacgcggatatcgccatgtgggatatttttgcccttcagcaccgccagcgccgtcatgatctcggcgatgcccgctttgtcatcggcccccagcaaggttttgccgtcagtggtgattaacgtctgccccagcagctgatgcagtaccgggaacatcaccggcgacagcacttcgtcgccaatgcccagcgcaatatcaccgccgcggtagttttcaacaatctgcgggtttacgtgtttaccgctaaaatcaggtgaggtatcgacatgagaaataaagccaattgccgggatatcgccgtcaatattcgccggcagcgttcccatcacggtccctttttcgctgagcgtgacatcaaccagccccatggcctccagctgctctttcagcagatttagcagcttccactggccttcggtgcttggcacctgtcggacccccggcttagattgggtatccagcgaaacgtaatgtaagaaacgctcaagtagtttatccatgcagtcaccctcactttttgtgacaacattatcattaagcagcaaaacgcaaatattgcgtcaggtcacttttatcccgcaaacgagaactttttacgtttatatcgttgtgcgttaataaatgtagcttatgaataagtgagaaggattggcgattcaatgggtttgccgtagaatgtccgccctcattacgagtcaccaaggtggttacacacaaaccccgcttcagtctgctgcctgaggcgtctatatgggacagcgcgaaaattgaatacacaaccccgttccctttcaccgctggtgcaactggaacgaattcgtaaaagtttcgatggcaaagatgtcatttccgaccttaatctgaccatcaatgacggtgagtttctcacgctgctcggcccctccggctgcggcaaaaccaccgtcctgcgccttatcgccgggctggaaagcgtcgataacggccatatccatcttgagaaccaggacataacccaggttccagccgaagatcgccacgtcaataccgtctttcagagctatgccctgttcccgcacatgaccgtgtttgagaacgtggcgtttggcctgcggatgcaaaaaacaccggccagcgagatcccacctcgggttaccgaagccctgcgcatggtacagctggaggcgttcgcccagcgcaagccgcatcaactttccggtggtcagcagcagcgtgtggccattgcccgcgccgtggtcaacaaacctcgcctgctcctgctggatgaatccctctccgcgctggactacaagctgcgcaagcagatgcagaacgagctgaaagcgcttcagcgtaagctcggcatcacgttcgtgtttgttacgcacgatcaggaagaagccctgactatgtcagaccgtatcgtggtgatgcgcgacggcaagattgagcaggatggcaccccgcgtgaaatttacgaagagccgaaaaacctgttcgtcgccagctttattggcgaaatcaatatctttaacgccacggtgatcgagcatctggacgatcggcgcgttcgcgcaaatgtggaaggccgcgaatgcaatattaccgtcaactttgccgtcgagaagggtcaaaagctcaacgtcctgctgcgcccggaagatctccgcgttgatgagatccacgacacggctgacgtcgaaggtctgatcggttacgttcgcgaacgcaactacaaagggatgaccctcgaatccgttgtggaactggaaaacggcaaaatggtgatggtcagcgagttctttaacgaggacgatccggacttcgaccattcgctggatcagaaaatggtcatcaactgggtagaaagctgggaggttgtactggctgatgaagaacacaagtaagttccagaatgtggtgattgccacgatcgtcggttggcttgtgttgtttgtctttcttcccaacctgatgatcatcgtgaccagcttcctgacccgcgacgacgcgaacttcgtgacgatggtctttacgctggacaactacgcgcgcctgctcgatccgctctattttgacgtgctgctgcactcgctcaatatggcgctgattgccaccctcgcctgtctggtgctggggtatccattcgcctggttcctggcccgcctgccgcaaaaagtgcggccgctgctgctgtttttactgattgtacccttctggaccaactcgttaatccgcatctacgggctgaaaatctttctcagcaccaaaggttatctgaacgagttcctgctgtggctgggggtgatcgagacgccgatccgcatcatgttcaccccgggcgcggtaattgtcggcctggtctatatcctgctgccgtttatggtgatgccgctctactccagcattgaaaagctcgataagccgctgctggaagcggcgaaagacctgggcgccagtaagttacaaacctttgtccgcatcattattccgctgaccatgccgggtattatcgccggctgtctgctggtcatgctgcctgcgatgggcctgttctacgtatcggacctgatgggcggggcgaaaaacctgctgatcggtaacgtgattaagagtcagttcctgaatatccgcgactggccgttcggctcggccaccagcataacgctgacggtggtgatgggactgatgctgctggtttactggcgtgcatcacgcctgctgaataagaaggtggagctggaatgatcggtcgactgcttcgcggcggttttatgaccgccatttatgcgtatctctatattccgataatcattttgatcgtgaactcctttaacagctcacgcttcgggatcaactggcaagggtttaccaccaaatggtatggcctgctgatgaacaatgacagcctgctacaggccgctcagcactcgctgacgatggcggtattctctgccaccttcgcgacgctgattggctcactgaccgccgtggcgctgtaccgctaccgttttcgcggtaagccgttcgtcagtggcatgctgtttgtggtgatgatgtccccggatatcgtgatggccatttcactgctggtgctgtttatgctgctgggcgtccagctcggtttctggtcgctgctgttctcgcatatcaccttctgtctgccgtttgtggtggtaaccgtctacgcgcgtctgaaagggttcgacgtacgcatgctggaagcggcgaaagatctgggtgcgagcgagatgaccattctgcgcaaaatcattctgccgctggcgatgcccgccgtggcagcaggatggctgctcagctttaccctgtcgatggacgacgtggtcgtgtcctccttcgtcaccgggccgagctatgaaattctgccgttgaagatctactcaatggttaaagtcggtgtttcacccgaagtgaacgcgctggcgactattctgttggtgttatcgctggttctggtaattgccagccaggttattgctcgtgataaaacaaaatctcaggggacacagaaatgaaaaaaatgcttgccgctgcggcactggtgctcggaatgggcgccgcgcatgctgatgacagcaaaacgctctatttctacaactggaccgagtatgtgccgccgggcctgctggagcagttcaccaaagagacgggcatcaaggtgatctattcgacctacgagtcgaatgaaaccatgtacgccaagctcaaaacctataaagatggcgcgtatgacctggtggtgccgtcgacctatttcgtcgacaagatgcgcaaagaaggcatgatccagaagatcgacaaaacgaagctaaccaatttttcaaacctcgatcctgagatgctaaacaagccgttcgacccgaacaacgactactccattccgtacatctggggcgcgacggcaattggcgtcaacagcgatgccattgatccaaaaacggtttcatcctgggctgacctgtggaagccggaatacaaaagcagcctgctgttaaccgacgatgcgcgcgaagtgttccaggttgcgctgcgtaaactcggctattccggtaacaccaccgatccgaaagagatcgaagcggcgtataacgaactgaaaaagctgatgccaaacgtggcggcgttcaactcggataacccggctaacccgtatatggaaggtgaagtgaatctgggtatggtctggaacggctctgcgtttgtggcgcgtcaggccgggacgccgctggaggtggtctggccgaaggagggcggcatcttctggatggacagcctcgcgatcccggcgaatgcgaaaaacgtcgagggcgccctgaagctgatcaatttcctgctgcgcccggatgtggcaaaagaggtggcggaaaccatcggctacccgacgccaaacctggccgcgcggaagctgttaagccctgaagtggcaaatgataaatcgctttatccggacgctgaaaccatcagcaaaggggaatggcagaacgacgtcggtgacgcgagccgcctgtatgaagagtattatcagaagctaaaagcaggccgttaatgcataacgggcgacgcaatgtcgcccgttactcttacagccccttcaggagtttatccacaaaggctggcaccacctcgctcgccagaccgtaatgtttctcttcaaactcgctcccgacctggcttggctccagattaagctccaccgtatgggcaccttgcagtcgcgcttcgtgaacaaatcctgccgccggatagacatgtcccgaagtgccaatggcgataaagacgtccgccatggccagggcgctgtagatctcatccattcccagcggcatttcgccaaaccagaccacatgcggacgcagacgcgaagggaactgacagcaatggcagcggtcttcgtccagcacgtcctctttccagtccagcacctgaccactccatgcgcaccgcaccttgagcagttcgccgtgcatgtggatgatgttgtggtttccggccctttcgtgaagattgtcgatgttctgcgtgaccagcagaaaacgatcccccagcgcttcctccagctttgccagcgccaggtgcgccgcattcggcgcaatctccggctgctgaagctggcgacggcgggcgttgtagaacgcctgcaccagcgccgggtcgcgggcgaaaccttccggcgtcgccacatcttcaactcggtgttcttcccacagtccgtccgccgcgcggaaggtctgaataccggattcggcggagatccccgccccggtcaacaccaccactctgggtttatccatcgcttctggcatcatcctgtctctgaaaaagatccgctgacgcaggcgttcacgtaagcggcgtttatttttgcgaaaacggctgagtcgaccctggcgacgcgacagcataataacctcgtaaactaatcggtgagatgaaggaatgcggctccgcgcatgcctcctgcgtccccgtgtcgcgcacgctcaatgcgcggcacgcgggcgaccggcaataaatgtcggggcagacgcccggacaactgttccgtaatcgcagtgaaatttgacagccctcccccgatcaccagcagatccgggtcgacgatggtcaggatattccccaggcacacggccagcaggtcgagatagcgttcaacgtgctctcgcgcctgcgcatccccttgttcccacagggtaatgatttggggggcgtcatgtttctgatgatagaagtgttcataaagccatgcaaacccacggcctgaaaggtaactctcaatacagccgtgctgaccacaaccgcagcggatcaacgggaaatcacgtccgacaacatccagcgcatccaccggcagacggatatgaccaaattcgccggtaatgtagctgcgcccggtaatgggcttaccgttaatgactatcccgccccccacaccggttccgagaatcaaacccatcaccagcggatagcgacgaaactcgtcgtcccaggcctctgagagagcaaaacagttggcatcgttgtctaagcgcacgtcgcgctcaaggagagcagagagatcggcacgcagcggtttgccgctggcggcaggaacgttggcggcatacagcgtgccatcgtcggtttcgggcatacccggaataccaatgccgacgctgcctatgacgccaaagcgttcatccgcttgcgccaccagcgcggcaatggcggttaaaaattcatcgtagctttcgcgcggcgtgggtacgcgggtttcccattgtagcttaaggtctttatcgaacacgccgagcgcaatcttggtgccgccaatatcaaatccgtaatacatgatgcattcctctgtttgattcagcggccaaaagaccgctaaaccatgacgaaattactggccacttaataccctcgccggatcaattcggcttgcgcgacgcgccggataccagcttgccagcagactcagtaaaagtgctgtaaccagcacataaataacgtccagccagtgcagttcagacggcaggaagtcaataaaatagatatcgcctgaaaggaactgatggccaataagcgcttcaatcccgttgataatcggcgtcagctgaagggaaaccaccacgccgatcgccacgccgcagaggctgccaaacagccccgccagcaaaccgtaccagacgaagatggcgcgaataagaccgtctttcgcccctaacggtacgcagcacggcgatgtcgccgctcttatccttaacggccatgaccagcgtcgagacgatattaaaacacgccaccccaatcaccagcaccatcgccagatacataatcgcgcggatcatctggatatcacggtacatatacccgtaagtgccgatccagcttttgatgtagacatagttattggtcacgctgccagcgtcacgcaccagtttattggcgttgaagacgtcgttaaccttaatggcaatgcccgtcacgctgtcgctcatatccagatactggcgcgcatcttccagcggcaccatcgcgaagctgtgatcgagctggccgctcagttgcaaaataccggtgacgtgcagacgtacgcgcttaggctgctgcaatttgtgatcagcgctggcgttcgggatcatgatcgagacccagtcgccctgcttcaccttcagcgcatcggcaacgcctttgcccatgatgatctgctgctcgccagccttaaagtttgcccatgcgccattttgcacatagcgcggcagcgcgctcagacgctcttcctgacgaggatttacccctttcacctgaatggcgcgcaggtttaccccgctctctaccagcccggtaaagttgatgtaaggtgcagccgccgcaatgccgggcaccttttccactttgttaagggcatcacgccagctggaccacggctggttaaccggctcgatttcaccgtgggggacaacggccagaatgcggttattcagttcacgctcaaagccgttcatggcgcttaagcccacgatcaacaccgccacgcccagggcgataccgatggtggagatcacggagataagggataccatcccgctccggcgacgaccgcggctaaagcgtaacccgatgagtaacgataacggtgaagccattactccgctcccatcagcgtcagttcagcattcaaacgaccgtcgcgcatttccagctgacgccccatccgcttagccagttgtaaatcgtgggtgaccaccagaaacgcggttccctgtgcggcgttcagttcgccgagaagctggaaaatgctgtctgcgttacgcgcatcgaggttacctgtcggttcatccgccagcaccaggcgcgggttgttgaccagcgcacgggcgatggccacacgctgacgctcgccgccggaaagctcagacggacggtgattcccgcgatgacccagccctaccgcttttagcatgtcgctggcgcgggcattaatttccgcgggtttctttttaccaatcagcagcggcattgcgacgttttccagcgccgtaaagtccggcagcagatggtggaactgatagataaagcccagctcgcggttacgcagctcggctttcgccgtagacgacattttactcagcggctgcccggagaagatcacatcgccttcggttggcgtgtccagcccgccaagcagatgcagcaacgtacttttaccggagccagagctaccgacaatcgccatcatctcgccttcgcccacgctaaaactcacattgtgcaacacgtcggtctgcacagtgccttcctgatagcgtttggacaggttgtcgcactgcaacaggatcttattcataacgtaaagcctcagcgggttgagtggcggcagcccgccaggaaggataaagcgtagaaagcagcgcaatggccatcgcggccagcgcaataccgaccacctggagcggctcgattgccaccggcagcgccgcgccatcaagcagcgcgccgataatcggcatgagattgttgagctggctggcgagcagcgcccccagcgccgcgccgagcagcgcgccgatgatgccggcgctggcgccctggaccataaataccgccatgatctggcgcggagtcagcccctgagtttgcagaatggcgacttcgccttgcttctccatcaccatcagcccgagcgaggtgatgatattaaacgcggcaacggccacgatcaggctcagcagcagccccatcatgtttttctccatgcgcacggcctggaacagttcgcccttccggtcgcgccagtcctgccatttcgtcccttccggtagcgtctgctggctaagggtatccaccttcagtggcgcatcaagccacagacgccagccggtgatatttcccgccgggtagcgcatcagacgcgaggcgtcctgaatgttaaccagcatctggtaaccatcgacttcgctgttcgccgcaaacgtgccaatcacgttgaacaggcgctggcttggcagacgccccatcggcgtaaactgactggctgacggcaccatcacgcgcagctgatcgccacggttgaccccgagctgcccggcaagctgctcgccgaggatgacgttgtatttacccgcttccaggtcggtttgtttcacattgaccaggaacggcgtcagcggatctttttgcgccggatcgatacccagcatcaccccgaccgccacgctacgggcgctttgcagcaccacatcgcccgtcgtgagcggcgcaacgcgcgtgacaccctgtaacttcaccgcgctttccggcagctgttgcggattaacggaaccctgagtggaagagagaacggcctgcggcatcagccccagaatattgttttgcagctcgcgctcgaagccgttcatgacggaaagcaccgtcaccagtgccatcacgccaagcgtaatgccaatagtcgaaagccaggagacaaagcgaccgaagcggtccgcggcgcgcccacgcatgtaacgtaagcctataaaaagtgcgacaggttgatacatgaaatccgtctgtttgctgatagcagacccacgagtatataagcgaatccgttaagcgtaaatgactgaaaccgtaagattcggtaatcatttttccgaaaaattcagataaatcatcatgctactgactgaacttccgccagacagcctccaccttttccgaaaatcgtcctgatacagactgttacccgttacatcagggtttcattttacaacaatcgacctttcgtttatggcaacaaggtcgtcacgcacaatgaaacaaaaagcattatggattaaccagataaaaggtctgtgtatctgcctggtggtgatttaccactcggtgatcaccttttatcctcacctggacgggctacagcatccgttatcgggcctgctcgccaaatgctgggtctactttaatctttaccttgccccgttccgtatgccggtgtttttctttatctccggctatttgatccgtcgatatattgacgaggtgaactggcgcaccagtctcgacaagcggatctggagcattgtctgggttttggccctgtggggcgtcctgcaatggcaggcgctgactcatctgaatgcctggctcgcccccgagcgagagctggcgacagcatccaatgcggcctacgccgattccgtttcagggtttgtacggggaatgctcacggccagcaccagcctatggtatttgtacgccttagtggtctactttacgctctgtaagctgctgagccgctggaaactgccgatgctggggcttctggcgctggcaagcatcgccatcaacttcctgccgttaccgtggtggggaatgaacagcgtggtgcgcaacatggtctactacagcctcggcgcatggtacggcgcgcagttgatggcgtggatgaaagggatgaatttgcgccgcagctgtctgatactcatcgcctctggtgcggtgtcggtggtgctgtggttcgctaatgtccctctgccgctctctctgctgtcaatcgtggttatcatgaagctcttttacagcttcgagcagcgttatgccgttcatcccaataatctgctgaacgtgatcggttcaaacaccatcgcgatatataccacccaccgcattttaatcgaggcatttagcctgctcctgatccgcgaaatgaatgcggcgtactggccgatctgggcggagttaacgctgattctggtttatccatttatcagcctgctcgtctgcacgctggttgggctgggggcacgtaagctctcgaccgccctctttggcgatcttttcttctcccctcccgcgcggctttcgcccgtgcccacgacccgctaactaaccctgtcccatacgggctacaaaataaggcctgcacagacggctctctctccctatgggagagggctggggtgagggtgaacatacagctgtggtgctcgttccgttcaccttatattccttgctattctataaccgcacgagcggtgaacgtgccagggtggctcagtcgccaccaccctggcaacccgggctcccggcggaannnnnnnnnnnnnnnnnnnnnnnnnnnnnnnnnnnnnnnnnnnnnnnnnnnnnnnnnnnnnnnnnnnnnnnnnnnnnnnnnnnnnnnnnnnnnnnnnnnnnnnnnnnnnnnnnnnnnnnnnnnnnnnnnnnnnnnnnnnnnnnnnnnnnnnnnnnnnnnnnnnnnnnnnnnnnnnnnnnnnnnnnnnnnnnnnnnnnnnnnnnnnnnnnnnnnnnnnnnnnnnnnnnnnnnnnnnnnnnnnnnnnnnnnnnnnnnnnnnnnnnnnnnnnnnnnnnnnnnnnnnnnnnnnnnnnnnnnnnnnnnnnnnnnnnnnnnnnnnnnnnnnnnnnnnnnnnnnnnnnnnnnnnnnnnnnnnnnnnnnnnnnnnnnnnnnnnnnnnnnnnnnnnnnnnnnnnnnnnnnnnnnnnnnnnnnnnnnnnnnnnnnnnnnnnnnnnnnnnnnnnnnnnnnnnnnnnnnnnnnnnnnnnnnnnnnnnnnnnnnnnnnnnnnnnnnnnnnnnnnnnnnnnnnnnnnnnnnnnnnnnnnnnnnnnnnnnnnnnnnnnnnnnnnnnnnnnnnnnnnnnnnnnnnnnnnnnnnnnnnnnnnnnnnnnnnnnnnnnnnnnnnnnnnnnnnnngcttattccttccggctatcgggtcgggcatgagcctgcatccatgcaggccacgccctctcggcgcatccctgcgcctcgccccggccttcaggaaacgcctccagcgatttacagccggaccagggcatcgctgaaagccctcagttagtctgaagacaacgttattgcttctgctttcaaattactgaggaaccctctacccatccgggggcactttccctcttgtgcggttacgatttgcttatgtaaaacgatcgaggataataaagacattgcgtatcagtgatatgccccaatactgttggtatatccccaagagactctgacatagccatgcctgaacactatcgtttttccttgcctgtaaaagcaggtgaccaacgccagctgggcgaactgacaggcgcggcctgcgccacgctggtggcagaaattgccgagcggcatccagggccggtggtgctggttgccccggacatgcaaaacgccctgcgcctgcacgatgaaattcgtcagttcaccgatagcctggtgttcagcctggccgactgggaaacgcttccctacgacagtttctctccgcaccaggagatcatctcctcgcgcctgtcgacgctgtatcagcttcccaccatgcagcgcggtgtgctgattgtgccggtgaataccctgatgcagcgcgtctgtccgcacagctatttgcacggccatgcgctggtgatgaaaaaaggccagcgcctgtcgcgcgatgccctgcgcgtgcagctggacggagccggctatcgacatgtcgaccaggtgatggagcacggcgaatacgcgacgcgtggtgcgctgcttgatctctatccgatgggcagcgatcggccatatcgtctggatttcttcgatgatgagatcgacagcctgcgcgtgttcgacgccgacacccagcgcacgctggaggaagtggactccattaatctgctgcccgcccatgagttcccgacggataaaaccgccatcgaactgttccgcagccagtggcgcgacaggttcgacgtgaagcgcgatgccgaacatatctaccagcaggtcagcaagggcacccttccggccgggattgagtactggcagcccctgttctttaacgaaccgctgccggcgctgttcagctacttcccggcaaatacgctgattgttaacaccggggatatcgacgccagcgccagccgctttgaaagcgaaacgcgagcccgctttgaaaatcggggcgttgacccgatgcgtccgctgctgccgccggacatgctgtggctacgtaccgacgagctcaacgccgaactgaagcgctggccgcgcatgcagctcaaaaccgacgcgcttgccgagaaggcagcgaacaccaatctcgcgttccggacactgcctgacctggctgttcaggcgcagcagaaatccccgcttgataatttgcgcaagtttcttgagtccttcaccgggccggtggtcttctccgttgaaagtgaaggtcgccgtgaagcgctgggcgaactgctgggacggatcaaagtcgcgccgaagcgcattcttcgcctgagcgaagcgaccggaaatggccgttacctgatgatcggcgccgccgagcacggattcattgatacgctcaacaacctggcgttgatttgtgaaagcgacctgctgggcgagcgcgtcgcgcgccgtcgtcaggacagccgccgcaccatcaacccggacaccctgatccgcaacctggccgaactgcaccccggtcagccaatcgttcacctggaacacggtgtgggtcgctatcaggggatgaccaccctcgaagcaggcggcatcaaaggtgaatacctgatgctgacctacgccaacgacgccaaactgtatgtgccggtgtcgtccctgcatctgatcagccgctacgccggaggcgcggaagagaatgcgccgctgcacaagctgggcggcgatgcctgggcgcgcgcgcgccagaaggcggcagaaaaagtacgcgacgtggccgccgagctgctggatatctacgcccagcgtgcggccaaagagggttatgcgtttaagcatgataaagagcagtaccagctgttctgcgacagcttcccgtttgaaactacgccggatcaggcccaggccatcaacgccgtgctgagtgacatgtgtcagccgctggcgatggaccgtttagtttgcggtgacgtgggcttcggcaaaaccgaagtggcgatgcgcgccgctttcctggcggtggaaaacaacaagcaggtggcggtactggtgccgactaccctcctcgcccagcagcacttcgacaacttccgcgaccgcttcgccaactggccggtacgcatagaaatgctgtcgcgttttcgcagcgccaaagagcagacgcaaatcctggaacaggcaagcgaaggcaaaattgatattctgatcggcactcacaagctgctgcaaagcgacgtgaagtggaaagatctggggctgctgatcgtggatgaagagcaccgcttcggggtgcgccataaagagcgcatcaaagcgatgcgcgccgacgtcgacattctgaccctgaccgcaacgccgatcccgcgcaccctgaacatggcgatgagcggcatgcgcgatctgtcgataatcgccaccccaccggcgcgccgtctggcggtcaaaacctttgttcgcgagtacgacaatctggtggtgcgcgaggcgatcctgcgcgaagtgctgcgcggcggccaggtgtattacctgtataacgacgtcgaaaatattcagaaagcggccgacaggctggcagagctggtaccggaagcacgcatcgccattggtcacggccagatgcgcgagcgcgagctggagcgggtgatgaacgatttccaccaccagcgtttcaacgtgctggtgtgtaccaccatcattgagaccgggatcgacattccgacggcgaacaccatcatcatcgaacgcgcggatcacttcggcctggcccagctgcaccagctgcgcgggcgcgtcgggcgctcgcaccatcaggcctacgcctggctgctgacgccgcatccgaaggcaatgaccaccgacgcgcaaaagcgtctggaagctatcgcctcgctggaagatctgggtgctggctttgcgctggcgacccacgacctggagatccgcggcgccggtgagctgctgggtgaagaccagagcggctccatggaaaccatcggtttctcgctgtatatggagctgctggaaaatgccgtcgacgcgcttaaagccggacgtgaaccgtctctggaagatctcaccagccagcagaccgaagtggaactgcgcatgccttctctgctgccggatgattttattcctgacgtgaatacccgtctgtcgttctacaaacgcattgccagcgcgaaaagcgaaggcgagctggaagagatcaaagtcgaactgattgaccgttttgggatattgcccgatgcggcgcgcaacctgctggatattgcccgcctgcgtcagcaggcgcagaagctgggcattcgcaaacttgaaggcaatgagaaaggcggcgtcattgagtttgccgagaagaaccacgtcgatccgatgtggctgattggcctcctgcaaaaacagccgcagcatttccgtcttgatggcccgacgcgtctgaaatttactcaggatctgacggaacgtaaaacccgcatggactgggtgcgtaactttatgcgtcagctggaagagaacgccatcgcataacggtttccccgccagcgcccggctggcggggggacaatttacaaactctttgcacttcgcccgaacttcccgactatacattcgccataattatcattaacgccttataaaacaataaccttatcatttgtatggattatgataatgatgatttcttcgcgttttacccgctggttaactctgtttgcgctggccgcgacggttgccgtcgcgctccctgctcgcgccaatacctggcctcttccgcctgccggcagcaacgtcgtaggtgaaaaccgctttcacgtggttgaaaacgatggcggttcgctggaagcgattgccaaaaaatataacgtcgggttcctggcgctgttgcaggccaacccgggggtagatccgtacgtgccccgggcgggcagcgtactgacgattccgctgcaaaccatcctgccggacgcgccgcgtcagggcattgtgattaacctcgccgagctgcgtctgtattactnnnnnnnnnnnnnnnnnnnnnnnnnnnnnnnnnnnnnnnnnnnnnnnnnnnnnnnnnnnnnnnnnnnnnnnnnnnnnnnnnnnnnnnnnnnnnnnnnnnnnnnnnnnnnnnnnnnnnnnnnnnnnnnnnnnnnnnnnnnnnnnnnnnnnnnnnnnnnnnnnnnnnnnnnnnnnnnnnnnnnnnnnnnnnnnnnnnnnnnnnnnnnnnnnnnnnnnnnnnnnnnnnnnnnnnnnnnnnnnnnnnnnnnnnnnnnnnnnnnnnnnnnnnnnnnnnnnnnnnnnnnnnnnnnnnnnnnnnnnnnnnnnnnnnnnnnnnnnnnnnnnnnnnnnnnnnnnnnnnnnnnnnnnnnnnnnnnnnnnnnnnnnnnnnnnnnnnnnnnnnnnnnnnnnnnnnnnnnnnnnnnnnnnnnnnnnnnnnnnnnnnnnnnnnnnnnnnnnnnnnnnnnnnnnnnnnnnnnnnnnnnnnnnnnnnnnnnnnnnnnnnnnnnnnnnnnnnnnnnnnnnnnnnnnnnnnnnnnnnnnnnnnnnnnnnnnnnnnnnnnnnnnnnnnnnnnnnnnnnnnnnnnnnnnnnnnnnnnnnnnnnnnnnnnnnnnnnnnnnnnnnnnnnnnnnnnnnnnnnnnnnnnnnnnnnnnnnnnnnnnnnnnnnnnnnnnnnnnnnnnnnnnnnnnnnnnnnnnnnnnnnnnnnnnnnnnnnnnnnnnnnnnnnnnnnnnnnnnnnnnnnnnnnnnnnnnnnnnnnnnnnnnnnnnnnnnnnaatgatttcgcacccatttcgtcagctttttgtgccagctgatcttccagagagcccaggttagtcccggcagtggcagagatggtaccgactttctgctggtctgctggcgtggattgcacttcaacagcagcgaagcttgcgaaagagagtgagctcagaacggcggcagcgatgagggttttaacgtttttcatgattttatacctttaggcagatgatgtagtggtcgttagttatttagttaacgatcgataggtaaatgatagatgtgatccaggtcacacgtcaactcatttttataatggtcgttaaattaatttcatttgccttatatttcataaagataaaattaaattatttttcagaaatcaccgctggtcgttgcagacgtttatttttataatgactattcaacaaaacaacagaggaccaacggcacatgacaaccgatgtcacgcgttgcgcgaagaaaagccgtggccgaccaaaagtgttcgacagggatgcggcgctcgataaggccatgacgctcttctggcagcatgggtatgaagctacgtcgctttccgatctcgtggaagcaacgggcgcgaaagcccctaccctgtacgcagagttcaccaacaaagaaggcttattccgggccgttctggacagatacatcgcgcgcttcgcggcaaaacatgaagcccagctgttctgcgaagaaaaaacggttgagcaggcattgcaggattatttcacggcaatcgcgacctgctataccagcaaggacacgcctgcgggctgttttatgatcaacacctccgcgaccctcgcggcatcgtctaaagagattgccaacacggtcaaatcgcgacatgcgatgcaggaggagacgctcagcacgtttctggctcagcgtcagcagcgcggcgaaataccggcgcattgccgtccgcaggagctttcccagtatctgagctgtattttacaggggatgtccatcagcgcccgtgaaggcgcgacgctggaaaaattgcaggggattacgcaaacaacgctgcgcctgtggcctgagcttcttaaactctgacgcaaaaaaaagctcctcagcctgagcgcatgaggagctaagttcagagaacatcttttttacactttgttattcagtatcagctgaccgttgctgtcgagagggatctgcgtgccaggatctttatccatgcggattttgccctgctgatcgccaattttgtaggttacgtcgtagcccaacattttttcagacttgtcatacacggttttacagcgctgctgcgttgtggtgtaggtatcattttcctgcattgcgccctgtacctggttaccggcataaccgccacccagcgcaccaaccaccgtcgcgacatccttaccacggccgccaccaaactgatgaccaatcaccccaccagcaaccgcgccgagcacggagcccgcgatacggttttcatcctgaaccggacgacgatgggtgacagaaacatttcggcactcctgacgaggcgtcttgaccgtctctttgatcggtgtagcggaaaccacctgcgcatactgcgggccacgatcaagtacgttcagactggcaacggcagccacacctaacgcagctgcgacgccaatccctatacccgccaacattgatttattcacgggacttcctcctttgttgcaattggtagcaattttgcagcgcaataaacgcttcgccaataagataaaggatcaaaatcagggctgttggccggaacaacgtgggtttaagagaactcttaagcgtcaggagggaaatgcacagcatgatgtgctaagaattccctccggagggcccggagggagagagaaattagtgcagcttcaggcgtggacggatcacgcggttgatgcggccaaccagcatcatcaggccggttttgaagtagccgtgcagcgcaatctggtgcatacggtacagagaaatgtacacgaagcgggcgatgcgcccttccaccatcatggagccgcgcatcaggttacccatcaggctgcccacggtggagaagtttgagagcgacaccagagagccgtggtctttgtagacataggctttcatcggtttgcctttcatctgtgccaggatgttatgcagcacgaggcttgccatctggtgcgcggcctgagcgcgaggcggtacaaatccgccttccggacgtgcgcaggaggcacagtcgccaatggcgaagatgtccggatcgcgcgtggtttgcagcgtcggctctgtcaccagctggttaatgcggttcgtctccagcccaccgatatctttcatgaaatcaggcgctttgatccccgcagcccaaaccatcaggtcggcctggatatattcgccgtctttggtatgcaggccgccctcatccgcgctggtcaccatggtctgggtcagtacgcgcacgcccagtttggtcagctcgttgtgcgccgcgccggaaatacgcggcggcagcgcagggagaatacgttcacctgcttccaccagcgtcacattcagcgcttcgttagtcagccctttgtagccgtagctgtgcagctgtttgaccgcattgtgcaactccgccgataattcaacgcccgttgcgccgccgcccacgatagcaatgttgaccttgccgttagcacccatgttgttggtgtacttcaggaacaggttaagcatctcctgatggaaacgacgcgcctgatgcgggttatccaggaagatgcagtgctcttttacgcctggggtgttgaaatcattggaggtactgcccagggccatcaccagcgtgtcataggccagcttgcgctcaggaaccagcaactcgcctttatcatcacgcagctcagccagcgtgatggttttgttttcacgattgatatccaccaccgaacccagctggaactggaagtggtggttacgcgcatgcgccagatagctcagcgcatccacgccctcatccagcgacccggtcgccacttcgtgcagtaacggcttccacagatgactgtggttacgatccaccagcgtgattttggctttcttaccgcgacccagcttcttacccagctgtgtcgcgagctccagtccgccagcaccaccgccgacaatcactatctttttcaatggcgtagtcaacgtgaccccctcaaattattaaccaattgttaattaaaagttatataaataacccttaattaacaacaggttactgcgctgaaaccattcagattcattgagaatagcacgtcaggcgcattggtcataccaaaattgatatgtatcaagttttgatggtttaaaagtagacaactctgacaaaaaagaggcccggtacgctttcacgtaccgggcctttatcaggttcagggagatcagcccagcgttttaaaggctttaatacgctgcaagtgcggggtaatgtttttgaacttgtgggtctgctcttcgtcccagacaatttcgtagtaatggtgcagaagctcggcggcgcgggagctgttcagcgcttcatcgttgcgggagaggatcaccagacaccgatcgcggttcttttcacggaaattgctcacgcatttagttgcgatgtcggcgtactcctccgggcgatcgattttgccttccatgttttcgttcggaaagaggttaggattaaaaatgacctgacggatatcgcacaaaaaaccgatgcgctctgcccagtatcctcctaaccccacgccgcagatcagcgggcgatcgtcgatattgagctgcaacattttatccacttctttaagcagatgctgcatgtcatgcttcggatgacgtgtgctgtaactgatcagccggacatccggatcgataaactgcaattgcagcactttctcatgattaccaggactgtttgagtcaaaaccgtgtaaataaatgatcatcgtctcaccacgctacgccttccgggatgaattaaagggctgctttatgtgcctgccagcgctcgttcagggcttcaagccgggcgtttaccgttttccagcgcgccgagtccatcagctcctgacgactaaatgaacctttatgatacaattgtgtaacacgttcagcattgatcggcgacaggttatccagcacgctcaccgcccctttacgattattgcagacgaggatcatatcgcaacccgcatccagcgaagcctgcccacgttcggcatagcttcccatgatcgccgccccttccatggataaatcgtcagagaaaattacgccattgaagcctaattcctgacgcagtacggttttcagccagtgcggagagccgctggccggacgcggatcgacctcactgtagatgacgtgcgcaggcatgatggcatccagcttgttatcagcgatcagcgagcggaaaaccgacatgtctttagcgcgaatgtctgcttccgggcgcggatcgcgcggggtttctttatgggaatccgccgtcaccgccccgtggcccgggaaatgtttgccggtggttttcatgcccgcagcatgcataccgtcaataaagcgcgtcgccattgccagcgcaatacgcggatcgtcatgatacgaacgctcaccaattgccgcgctaatgtgtcctgcgtccagcaccggggcgaagctgatgtcgatatccatggcgatcatctcgctggccatcagccagccggcgtcctgcgccagttgaccgccctcttcgatccccagcagcgcagcaaaagattgcgcggcgggtaaacgggtaaacccttcgcggaaacgctgcacacgcccaccttcctggtctacggccaccaccaggtgattgcgcgacgccgcacggatctggcgaaccagctcacgcaactgctccggatcatgataattgcgggtgaaaagaatcagcccccctaccagcggatgcgccagaatttcgcgctcttccgcatccagctcaaacccttcgacatccaacattactggacccacacctacctctcttatcctttcgtttgtaactgacgccaggcatcatttgccagcgcaataaattgtttgtcatctgtctgctgaaggcgcatttcaaaccatcccgccatcagcatcaacacccacggacgccagcgcgcgacctgccgcgcaagggtgagcgcattgatattggcgtttcgggcataggcggttatcagctgctcgcgcgacgcctcatcaggcatccagaccgcagcgagttcgagcgccacgtcaccgtctccggcatattcccagtcgataagtttctcgcctgccgtggtatgaacgatattacccgcgtggacatccatatgcagcggcgccagacgtaacgcctgcggctctcccgctttacgcagccgcttaagctgcgccagccagtagggcgtgcgtcgtccaggcgcagcctgctgccagtagtgatccagcaaaggaagtaacgttacccgccagcccagacgcggctggcgatgcagatgatacagcatggctgcaagtgcaggcgtatcgggaagctcgcttttgatctcacccgcaataaacgccaccgccatccagtctctgataaagagatgaggttgtggcgcaaggtcggcgggcaggcgcttcagggcgcggaactggcgacgaaaatgggaggcaggcgcggcggcatcgtgatgctgacgtaaaaccagccgatggtcgccacgctcaataatgcaactcgcgccgccaagcccggcgggggcttgcggcgcgataacacggtactgagggaaataacgcgtcaggacgtcatgacgcgtgcgcttattgttgcgtaacgnnnnnnnnnnnnnnnnnnnnnnnnnnnnnnnnnnnnnnnnnnnnnnnnnnnnnnnnnnnnnnnnnnnnnnnnnnnnnnnnnnnnnnnnnnnnnnnnnnnnnnnnnnnnnnnnnnnnnnnnnnnnnnnnnnnnnnnnnnnnnnnnnnnnnnnnnnnnnnnnnnnnnnnnnnnnnnnnnnnnnnnnnnnnnnnnnnnnnnnnnnnnnnnnnnnnnnnnnnnnnnnnnnnnnnnnnnnnnnnnnnnnnnnnnnnnnnnnnnnnnnnnnnnnnnnnnnnnnnnnnnnnnnnnnnnnnnnnnnnnnnncgccggtctgaaccagcattaactgcatctgcaacgacggcgtgttcacgttgcctgtcgcgttagaataaaggacatactgcgcgccaacgttgcgggcgataccaatcgctttactgcgcgaacccaggctgtcctggggcgacagaccaagctgctgcttggcgaccgcgagctgctgggctgagaccagcgtaaatttaccgttgtttgccagcgcgttgcgcagggtttccgtcgcttctcccgcattcagggaaccgtttgtacggttgttcacgctgtccaccagcagcacgctgccgggcgtaacgccctgtgcctgcaacattttgcccaccatcggctgcatcgcgccgttccagtcatagtggcgtactcgcggcgcaggctgtgcactgtcgtccggatgttcgatcgggccaggctgcgccggaatggtcggtacagacggcacggttggaacaggctgcgctggcgttgttggctgttccgttcccggcttcgcctgatctaccggtgctggttcttccgttcgcgtcacacaacccgccagaaagagtgcaaaagcactcaggagcgcataacggctcattgttttaatcaaggttcactccttacaaataaagataaagtctcaccttatgtgcacccagatagctggcgctgccgtagagcgtgaccgacgatcttgccgggatggtcacgctgcgcggagcctcaagcgggtgcatctcaagacctctcacgtcataccagtagaagcgataatgcaccgtcactggctcttgcctttcgttatagagcgtagaggaggctgaagactggatttcgcttatggtcagcgaaggtttctccgccgtgatgcccgcagcaagcactgaggactccatcaccagcgtctgttcttcactgaccgggatggcgggacgcgcgctgcacccaaccattaccagcgtcacgatcagcgctgcaatacgcccagttaacatattaaagacctttatgtgccagcatcggtcccagtggacgtccacccagcagatgcatatgaatatgatagacttcctggccgccatggcgattacagttcatgatcagacggtatccgtcttcagcaaccccttcctgctctgcgattttcgcggctaccgtaagcatacggcccagcgccacttcatgctcggttttaacgtcattcacggtcgggatcagaatattgggaataataaggatgtgcgtcggcgcctggggagaaatgtcgcggaaagccgtgaccagttcatcctgatagacaatatccgacggaatttcgcggcggataattttactgaaaatcgtttcttcagccatgaccttttccttttaagtttaatctggcgtcgtgcgtccgttgttaacacacattgtctgatttactgcgtgacacaagacaagagtatgagcgagtttctcctgtcctttcaaccttctcccgtgatttctttcctgattgtccgccatctggctgaagaggcatcgctttaggacatttcttttctgaaaccttatttcagttcatcccgaaacatctgtttacagcgttaatcacaatgcgtatatttcgcatttgcattttcatgcgcatttttaacatagaaaacgacgtcagcccgtgctagcgggactgtcgcgaattaccttcaccattcactaagggtttgatgatgtctttcattaatcacaccagggatgggcaacatcagcctgccgcaacaccttcgttgctggccgcctgcattgctatggcattgacgccaaccgccgctttcgctgcttcaaccaccgaagataccgtcgtcgtagacgggggttttgacaacacacaggatctttctgccagccaggatcaggattacagcgtaaaaaccaccaccaccggcaccaaactgttgctggttccccgcgacatcccacagtccgtcagcgttatcagccagcaacgtatggctgaccagaatctgcaatccatcggacaggtgctgacgaataccacgggcattacggcccaggtgcaggacagcgaccgtaccgtgttttactcacgcggctttttcgtcagcaactacgcctatgacgacctgccaacctccatcagtgaagtgtggaactttggtgataccgccgcggataccgcgatttatgaccgcatcgaagtggttcgcggcgccaccggcctgatgtccggcacgggcaacccggcggcgtacgttaatatggtgcgtaagcacgcggacagcccggaatttaaaggtatcgtctccgccagttacggcagctgggacaagcagcgctacgtgctggatctccaggcgccgctggtagagtcaggtaaggtacgaggccgtctgatcaccggttatcaggacaacgacagcttcgtggataactaccactaccggaagaaattcctctacggcgtgatggacgcggatgtcaccgacagcaccaccctctcggtagggtatgagtatcaggaaagccataccgccgacccgacctggggcgggctgccgacctggtacagcgacggaagtaagacccactacaatcgtagccagaccgtcgcacctgactgggcttattcagataaagacagcacccgcatcttcgctaacctgactcagcgtttcgataatggctgggaagcgcacatcaacggtatgcacgctgaaaccaacttcgactccaaactgatgtatatgtccggctatccggataaagagaccggtgcgggcctggtgggttacggcggctggaaccgtggggaacgtaaacaggatgcggttgacgccttcctgcgcggcggcttcgatctctttggccgtcagcacgaaatgatgttcggcggcagcttcagccgtcagcgtaaccattacgacaactccatgccggatgcggtatacggcatggttgatgtcggcaactttaagaactggaacgggaacatcgccgatccccagtggacgccgtggaaactctacagcaaggatgatattcgccagtcttcagcctattcgtcggctcgtttctcgctggccgatccgctgcacctgatcctgggcgcgcgctacacccaatataacattcgttataacccggcaggatcgccgaatacccgtctggaaagcaccaaagatgatgtcacgccgtacgccggcctggtgtatgacatcaacgaggactggtcgacctacgtcagctatacctctatcttccagccgcaggataagcgcgatgccagcggacgttatctcgaccctaccacgggtaaaagctacgaagccggggtgaaggcggactggtttaatacccgcctcaccacctcgctggcgattttccgcattgagcaggataacgtcgccagcaacacctatacctacatgccgagcggtgagtcgatctatgaatcgctggacggcgtggtcagcaaaggggtcgagttcgagctcaacggtgccctgaccgataactggcagctgaccttcggcgcgacgcgttacatcgcagaagataagaatggcaacgccgtcagcgccgatcagccgcgcacaaccatgaagctcttcacccgctatcagctgccaatgctgccggaactgaccgtgggcggtggcgtaaactggcagaacaaagtgtggacggacgtggaaggtggcccggcaggacgttcccgcgcggagcaaggcagctatgggctggtgaacctgttcagccgttatcaggtcaccaaagattttgcggtgcaggcgaacgtcaacaacctgttcgacaaagagtattacgactacgtcggatcgtatgctgtttatggcgcgccgctgaacgtctcggtgagcgcgagctacgacttctgagtgacagaagcccggtggcgctgcgcttaccgggcctacccatcacgtaggccgggtaaggcgcagcgccacccggcaccacaaaccgcagtaataaaaaaggcagccattcggctgccttagtctccccaggtcacagcttagttgttgcggatgtactcatccatttcggttttcaggttatcggatttcgtaccgaagattgcctgaacaccagaacctgcaacaacgacgcccgctgcgcccagttttttcagacccggctggtctactttcgcaacgtcggcaacactcacacgcagacgagtgatacacgcgtccaggttagtgatgttctctttaccaccgaaggcagctaccagagcaggcgccatttcgctggtcgcaccggctttgctgtcttccgttgcatcttcacgacccggcgttttcaggtccagtgctttgatcagcacgcggaagacggtgtagtacaccactgcgtagcccgcacccacaattgggaacagccacagcttgctgctgttaccggacagaacgatgaagtcgatcagaccgtgagagaaggacgtaccgtcacgcatacccagcaggatacagattgggaatgccagacctgccagtaccgcgtggatgatgtacaggatcggcgcaacgaacatgaaggagaactcgatcggctcggtgataccggtcaggaacgaggtcagcgctgcggagatcatgataccgcccacttttgcacggttctctggtttagcagagtgccagatcgcaattgcggcggccggcagaccgtacattttgaacaggaagccaccagacagtttacctgccgttgggtcacccgccatgtagcgtgggatgtcgccgtggaacacctggcctgctgcgttggtgtattcaccaatctgcatctggaatggaacgttccagatgtggtgcagaccaaatggtaccaggcagcgctcaatgaagccgtagataccgaacgccacaaccgggttctggtaagccgcccactgagagaaggtctggattgccgtaccgattggtggccagatgaaagacagaaccacaccggtgaaaatcgcggccagaccagaaatgatcggcacaaaacgtttacccgcgaagaagcccagatactcaggcagcttgatgcgatagaagcggttaaacatatacgctgcaatcgcaccggagatgataccaccgagaacaccggtgtccgccagatgcttagcggcaatctcttcagcaggtaagtgcagtaccagcggcgcaaccacagccatggttttcaccatgatgccgtaagcaacaacggacgccagcgcggatacaccgtcgttattggtgaagcccagagcaacaccgatagcgaagatcagcggcatgttagcaaaaacagaaccgccagcttcggccatcacgtgggaaactacggctggcagccagctgaagtttgcagaaccgacacccagcaggatacctgcgataggcagtacggatactggcagcatcagcgatttaccgaccttttgcaggttagcaaatgcattcttaaacataattgagagtgctcctgagtatttgtgctttttttacgttttcacgcattggcccggggggagtaccgcgccgtggacaggacatctaagcgccctttatttattacacagagtaaaataattccctctgagtttgtttgacggctatcacgtttcagttcaagacggccaaaaaacttgcagatatttacataaagcatgtctggatgtgtctaaaaacgccatcaccgccccaaatgaggcggtgaactttactcgttttacttattaattacgagcctaaaaataacaggcgtatcagacagattgcaggcgggcggggtcgatatggaacagactggcgaagttttccgttgtcacgcgagccagctcttcaatactgacacctttcagaacggccatatactcagcgacatcccgggtcatcgctggctgattctctttgccgcgatgaggcaccggcgccaggtacggtgaatcggtttccaccagaatacgatccagcggaacatagcgcgccgcatcacgcagttgctcggcattgcggaacgtgacgatccccgaaaacgagatataaaagcctaaatcaagcagcttacccgccgtttctctgtcttcagtgaaacagtgtagtacgccaccgcaatccgtcaccttttcttcccgcaggatcgccagcgtgtcggcacgcgcatcgcgggtatgaacgataaccggcttattcagttcacggccaatacggatatggttgcggaaggattcctgctggcgaggtttcgtttccggggtgtagaaatagtccaggccggtctcgcccatcgccactacgccctcttctgcggcgagacggcgtaaatcctcaacgtcgtatgcttcatcctgattcagcggatgcacgccgcaggagaagacgacattatcgcgctcgcctaccagttcacgcatggagcggtaacccggcaacgtggtcgccacggccaggcaaaatttcacatcgcgcgcggcggctttcgccagcacgtcgtccacatttttatgcagggactgataatccaggccatcgagatggcagtgtgagtcgactaaaaacataatgtctctctcagaggtgggaaaccggcggtatgacgcccggttgcaggtagtgttcgatacgcagtaactggtcggtcagtaaaagctcgcgattgagaccggtcactgtcaaaagttgttcacggctctggcagatatcatgaaggatagcgtgcagcgactgccctgacaggcgattcgccagcgtggtgaccagcgcccacacgtcagggttagtcagaagcgtcgccccctgctggattttgagcgcatccagcagcagtgcggccagccagtgtagccgttccggagcctgatcgctgttcagcgctggcagcacgctcagccagtcatggctgtcgagggctgattcaaccgcacgacacagcgtttcacgctgagaccacacttccggctgcaataaggccagcgcagccgcaggcgcaccgctgcacaggcgcaacgccgagcgcgccgcatcttgtgacaccgtcacttctcgctcaagccaggcgagcgcccaggattcctgagggacagcgaggtggtgaagacggcagcgactgcgcagcgtcgccagcaagcgttcaggctcgcggcaggagaggaaaaaccaggtattctctggcggctcttccagggtttttaacagggcgttggctgcggcttccgtgagcagcgcggcgtctttcagccacaccactttcgccccccccagacgcgcatattcgtacagtttctcactgacctcacgcaccgcgtcgataccgagcgtatttttgcccttctcgggttcgagggtgtaatagtcaggatgcgtgcccgcctgcatgagctggcaaccccggcatttaccgcagcttttatgtccttccggctgttggcacatcagaaagcgggtgatggcgtaaatcaacgcatcatcacccattcccggcagcgcctggatcagtaacgcatgatgcccccgaccaacctgatagctgccgatcagctgttcaaagtgtgggcgcaaccatggataccatttcatgcctgctgctcctgtagccactgcgtaacggtctgctgaatatcacgcgtaacgtcttcaagggattgcgtcgcatcgatggtacgaatggtcttgtcctgcccggccagttccagataacgcgcacgggtgcggttaaagaaatcaaaagactcctgttcaatgcggtccagttcgccgcgggcacgggcgcgcttcaggcccacctcaggagttacgtccagatacagcgtcaggtcaggacggaaatcgcccagaaccgcgtcgcgaagcgtagccagcatggcctgatcgataccccggcccccgccctgatacgcctgggttgagagatcgtggcgatcgccaatcacccatttcccttctgccagagcgggtttgatcaccgtctccaccagctgaacgcgcgcagcatagaacatcagcacttccgctttgtcggtaataacttcatcgccaacggatttgatatccagaaccaggctgcgcagtttttccgccagttgcgtaccgcccggctcgcgggtaaagaccatgtcggcaacgccaagcgacgtaagcgtatccaccaccacgttacgggcagttgttttgcccgccccttcgagtccctcaatgacaatgtatttactgcgcatttttttccttaagtgccttcagatagtcctgaacggagcgattgtggctggccaggttggtattaaacgtatgccccccttttccgtcagccacaaaatagagatacggcgttttggccgggtgcgcggcggccttcaacgatgcttcactcggcgtcgcgatcggtccaggcggcaggccgctaatcacgtaggtattatacgccgttggcgtctccagatcttttctggaaatcctgccgttgtagttttcgcccatgccgtagatgacggtaggatcggtttgcaaacgcatgccgatgcgcagacggttaataaacaccgaggcaacctggtcacgttcggcagcaacggccgtctctttctcgatgatcgaggccatcgtcatgaactggttttgatctttataaggcaggccctctgctcgccctttccaggcagcgtctaccgccgcgaccattttgttgtgcgcgcgcttcagaatggccacatccgtcgtgcctgccgtatacatccacgtatcgggccagaaccagccttccacccactcgggatgttcgaattttaaggcgtctgccacggtctggtagcggtcatctttcagcgtatgcttaatgtatggcgcgtcccgcagctgcctgaggtaatcgctcagacgcataccttccacaaaacgcagcgggaactgggcttctttaccactctccagcagttgcagcatctcnnnnnnnnnnnnnnnnnnnnnnnnnnnnnnnnnnnnnnnnnnnnnnnnnnnnnnnnnnnnnnnnnnnnnnnnnnnnnnnnnnnnnnnnnnnnnnnnnnnnnnnnnnnnnnnnnnnnnnnnnnnnnnnnnnnnnnnnnnnnnnnnnnnnnnnnnnnnnnnnnnnnnnnnnnnnnnnnnnnnnnnnnnnnnnnnnnnnnnnnnnnnnnnnnnnnnnnnnnnnnnnnnnnnnnnnnnnnnnnnnnnnnnnnnnnnnnnnnnnnnnnnnnnnnnnnnnnnnnnnnnnnnnnnnnnnnnnnnnnnnnnnnnnnnnnnnnnnnnnnnnnnnnnnnnnnnnnnnnnnnnnnnnnnnnnnnnnnnnnnnnnnnnnnnnnnnnnnnnnnnnnnnnnnnnnnnnnnnnnnnnnnnnnnnnnnnnnnnnnnnnnnnnnnnnnnnnnnnnnnnnnnnnnnnnnnnnnnnnnnnnnnnnnnnnnnnnnnnnnnnnnnnnnnnnnnnnnnnnnnnttgaaatgggacaggtccggttcaatacgcagcagccactggaatacgcgtgggcgattgataattttgtcgtcatacagctgctgaccaagcgcctgccgcccggtacccgctttcagggtaaaaatcgtctcgtctttaatcaggatctgactctccgccagctgacggactttccacactcccgctccgccagcgataccgaacgcaacgataagaaggaggacaaagcgtaacattttcttcatgactacctggtttgctcacataacggggccagaaactggaacagctcgcgggatgaccagcatttgcggccataagcgcgaacggggacaacgggcatcagcgcattgcagataacaacttcatcggcagacagcagcgcctcttccttagcgttgacttcgacaacgcgaaagcctgcacgtgccagctggtgcatacaaaactgccgcataatgccgttgacgccggcctgctccagcgaaggcgtgaacacatcacagcccttccgccagagtaaattagccgcacagcattccgtaatgtacccttcgctgtcaagaaccagcgcctccccggcctccgtctgctcaagatgagtacgaataagcacctgttcaaggcggttgagatgttttataccagcgagcatcgggtttcgccccagacgtaccggacttagcgccagggctacgccctcttcacgccagtgcgcataatgggaaggataatctgaaacggaaaggacccgcgtaggatgcagacaggcagaaccgctatagccccggccaccgctcccgcggctaataatgactttcaggacgccgcttgctttatctgacgccagccgacgcatttcactttcaagaatgtcccactgcgagaaggggatcagtaatgcttcgcaggctttttgtaaacgaaggatatgggccccgagcagacacacgccaccgtcgagaatacgcgcagtcgtgaaacagccatcgccaaactgggtcgccctgtcgctggctggcagcgtttcttgctcaaggccattaatcaaaaacatggtggctccttatgcgtggaggctcagtctggcaggatgtgagcagccggacaaggggatttcacctaataaaaaaggcccggcaagcggaccttttttatcgtcagcgactaaccagactcagacctttttgaagatcagagagccgttagtcccaccgaagccgaaggagttacacagggtatactccataccgctaacctggcgcgcttcgtgaggaacgaagtccagatcgcaaccttcatccggataatccaggttgatggttggcggtacagcctgatcgcgcagcgcgagaatagagtagattgactctactgcccccgcagcacccagcaggtgaccggtcatggatttcgtggagcttaccattacgcggccggcagattcgccgaagatagacttaacagcctgcgcttctgctttatcgcccgcaggggtagacgtcccatgggcgttaacgtagccaatctgtgctggcgtaatgcccgcatcgcggatggcgttttccatcgccagcgcagcgcctgcgccgttctctggaggagacgtcatgtgataagcatcgctgctcatgccaaagccaacaacttcagcataaactttcgcgccacgttttttcgcgtgttcgtactcttccagtacgatcatgcctgcaccgtcacccagcacgaaaccgtcacggtctttatcccacggacggctcgccgcctgcggattatcgtttcgggtagagagcgcacgcgctgcaccgaagccaccgacgcccagcggggtactggctttttcagcgccgcccgcaaccatagcatctgcatcgccgtacgcaatgatacgcgcggcctggccgatgttatgcacgccagacgtacaggctgtcgcgattgagatgcttgggccacgcaggccgaacataatggtcaggtgacctgccaccatgttgacaatcgtagacggaacgaagaacgggctgattttacgcgggccgccattcatcagagatgtatggttttcttcaatcagaccaagaccgccaatcccggagccgatagcggcgccgatacgggtcgcgttctcttccgtaatctcaaggccagaatcctgcatggcctgaacgccagcgacaattccatattgaatgaaggcatccatcttgcgctgttctttgcgcgagatgatctcttcacagttaaaatcctttactaagccagcaaatttcgttgcataggcgctagtatcgaaatggtcgattaggctgatgccgctctgaccggcaaggagagctttccaggtggactctacggtattgccgacaggagacaacatgccaagtccggtcacaactacacgacgcttagacacgcttgtcctccagggagggataaaaaaagagattcgtgggacaacaaaagataaaactcaggcggtcgaatgaccgcctggagatgttcacttacgcctggtgaccgttgatgtaatcaatggcagcctgaacggtggtgattttctcagcttcttcgtccggaatctcagtatcaaactcttcttccagagccattaccagctcaacggtgtcaagagaatctgcgcccaggtcttcaacaaaggaagcggagttcacaacttcttcctgcttaacgcccagctgttcgccgataattttcttaacgcgttcttcgatagtgctcatactcttaaatttcctatcaaaactcgctttcgcgatggttttcgtagtgtataaaatgttgaaaaatttgcaactaaatcccggcaggtcttaccacgattttacgttattttgaggccatttgcccaaataacgcaaatattttcgatcgtgattaaaccatgtacatcccgccgttgacgtggagggtttcaccagtgatgtaacccgcttcgtcagaggctaaaaatgcaaccgcgctggcgatttctttagggtcgccaagacgacccgcaggaactgccgccagcgtacccgcacgctgctcatcagtcagcgcacgcgtcatgtccgtttcaataaagcccggagcaacaacgtttacagtaattccgcgggacgcgacttcacgcgccagcgacttactgaaaccgatcagacctgctttcgccgcagcgtagttagcctgaccagcatttcccatggtaccaaccacagaacctacagtgataatacgaccatgacgctttttcatcatagcgcgcattaccgcttttgacagacggaatacagatgacaggttggtttcgataatatcgttccactcgtcgtctttcattcgcatcagcaggttgtcgcgagtgatcccggcattattgaccagaatatccacttcgccaaactctgcgcgaatattttccagaacagattcgatagatgctggttcagtcacattcagtaccagacctttaccgttcgcacccagatagtcgctgatggcctgtgcgccattctcactggtcgcagtcccgatcaccgtcgcgccgcgcgcaaccagtgtttcagcaatagcgcgcccaataccgcggcttgcgccggtcaccagggcaatttttccttcaaaactcatggtattcctcttttattgcgagagcgccgctttcatggcttccggctcgttaatcgccgaggcagtcagggtgtctacaatacgttttgtcagaccggtaagtaccttacctggaccaacttcatacagatgttcaacgccctgagacgccataaattcaacggttttagtccactgaaccgggctgtagagctggcgaaccagcgcgttacggatagcctccggcgcggtttcgcactgcacatcgacgttattcacaacggaaatcgtcggtgcgttaaaggtcattttttccagctcaaccgccagcttatcggcagcgggcttcatcagcgcgcagtgagacggtacgctcaccggcaggggcagtgcacgttttgcgcccgcagctttacaggcagcacctgcacgctcaaccgcttctttatgacccgcgataaccacctggcctggcgagttaaagtttaccggagaaacgacctgaccttcagcagattcttcacaggctttagcgatagaagcatcatccagaccgatgatggcagacatgccgcccgtgccctctggcaccgcttcctgcatgaatttaccacgcaattcaaccaggcgtaccgcgtcagcgaaggcaatcacccctgcgcagaccagcgcagagtattcacccaggctatgacccgccatcagcgtcggcgctttgccgccctgctgctgccatacgcgccacaatgcgacggaggctgccagcagtgccggttgagtctgccaggttttgttcagctcttcagcggggccctgttgggtcagcgcccacagatcataacccagcgcgtcagaggcttcacggaaagtctcttcaataaccggatagtttgctgccatttcagacaacatcccaacagtttgcgagccctgtcccgggaacacaaaagcaaattgcgtcattttttaatccttatcctagaaacgaaccagcgcggaaccccaggtgaacccgccaccaaaggcttcaagcaagaccagttggccccgtttaattcgtccatcgcgtaccgcttcgtcaaatgcgcacggtaccgatgccgcagaggtgttgccgtggcgatcaagcgtcnnnnnnnnnnnnnnnnnnnnnnnnnnnnnnnnnnnnnnnnnnnnnnnnnnnnnnnnnnnnnnnnnnnnnnnnnnnnnnnnnnnnnnnnnnnnnnnnnnnnnnnnnnnnnnnnnnnnnnnnnnnnnnnnnnnnnnnnnnnnnnnnnnnnnnnnnnnnnnnnnnnnnnnnnnnnnnnnnnnnnnnnnnnnnnnnnnnnnnnnnnnnnnnnnnnnnnnnnnnnnnnnnnnnnnnnnnnnnnnnnnnnnnnnnnnnnnnnnnnnnnnnnnnnnnnnnnnnnnnnnnnnnnnnnnnnnnnnnnnnnnnnnnnnnnnnnnnnnnnnnnnnnnnnnnnnnnnnnnnnnnnnnnnnnnnnnnnnnnnnnnnnnnnnnnnnnnnnnnnnnnnnnnnnnnnnnnnnnnnnnnnnnnnnnnnnnnnnnnnnnnnnnnnnnnnnnnnnnnnnnnnnnnnnnnnnnnnnnnnnnnnnnnnnnnnnnnnnnnnnnnnnnnnnnnnnnnnnnnnnnnnnnnnnnnnnnnnnnnnnnnnnnnnnnnnnnnnnnnnnnnnnnnnnnnnnnngcccagcttcttcgccgtcgcgctgataatacgcaggttagcctgatgcggtaccagccagtcgagtgcggcgcggtccagattgttcgcttccagcgtctcatcaacgatgtgagccagttcagtcacggccactttaaacacttcgttacctgccattgtcaggtaaatcgaactgtccggattaacgcgatcggcgttaggcagcgttaacagctcgccgtagcggccatcggcatgcaggtgcgtggagatgatgcccggctcttcggactgccccagcagcaccgcgcccgcgccatcgccaaaaataatgatcgtgccgcgatcggttggatcgcaggtacgcgccagcacatcagcgccgatcaccagcgcatattttacggcacccgattttacatactgatcggcgatgctcagcgcataggtgaaacccgcgcacgctgctgcaacatcaaatgccgggcagcctttgatgccgagcatgttctgcacctggcacgctgcgcttggaaaggcatgcgtggcagaggttgtcgccaccacaataagcccgatctgttctttatcaatgccagccatctcaagcgctcgctgagcggcttcgtagcccatggtggacacagtttcgtctggcgcggcgatacgacgttcacggatacctgtgcgcgtgacaatccactcgtcagacgtatctaccattttttcaagatcggcgttggtacgcacttgttttggcaggtagctgccggtacctaaaatcttcgtatacatgtacgctcagtcacttttagctaatacagatcccaggcgagcggcaatcctctgagggacttgtcgctgcaccgcctgcactgcctgttcaatcgcgacggtaaatgctcgctgattggcggcgccatgactcttaatcacgatgccgcgcaatcctaacagacaggcgccattatactggtcggggttgaggtgactgaatcgccgcgtcaggcttttttgtaaccaacgctttaataaaatcagccaccaggacctttttttaccttctccctgcgatttcagcagagaaaggaacattcgtacgaccccttccatggtcttcaacgtcacgtttccggtgaagccatcacacactaatacatccgttttgcccgtcagcaactcattggcttcgagataaccaatatagttgatggaggggacctgtttgagtatttccgcagcgtcgcggatactgtccaggcctttggtctcttcttcaccaatattcagtaacgcaacgcggggattgttaatcccgaccacgtcttctgccagcaccgaccccataacggcaaactgagccagcattgtactatcacaatccacgttagcgcccagatccagcaccaccgttttgcccttctgctgatgcggtaataccgtcaccagcgccggacgctcaatgccctcaatcggcttgagcaataatttcgacagccccatcagcgcgccagtatttcccgcgctgacgcaagcctgcgctcgcccttctttcaccagctccagcgccattcgcatagagctgccgcggctattacgaatagcctgcgatggccgggcatcactggcaataactgactgcgcaggaataatctgcagacgcgaacgttgttcaaagtcagcttttgcaagtaatggcgtgattgtgtcgggattaccgactaaaagaagtgtgagttgcgaattagaattcagtgcctgcaatgctgcaggcactgtcacggtagggccaaaatctccccccatgacatctaacgccagggttagacgtgtcaaggtatcgtcgcagcctggttcggtaaactccccgtttgcacggggaagttcctcactaagcctaatcacgctgacgcgtgattacttagtgataaccttgcggccgcggtagaaaccgtcagcggtgatgtggtgacgcaggtgtttctcaccagaagtcttgtctacagacaggctggtaactgcggtcagcgcgtcatgggaacgacgcatgccacgtttggaacgggttggtttattctgttgtacggccatggaccttactcctcaattacttacgctttaagctggctaatacggcaaatgggtttggtttttgcgcttcatcaggcagttccccaaagaccatgtccgcctcggacacttcacagtgttcagaatcatgcaccggaacgactggcagggagaggatgacttcatcttcaaccagcgccagaagatcgatttcaccgaattcgttaacctcaatcggctcatacgcttccgggagtgcttcagcctgttcgtcagaacgaaccggactaaaacaatacgttgtgtgaacatgctgtacaaacggtttcccgcaacgctgacattcgagcgttaccgtcacctttgcatcaccggttaacacggcgagacgctggttgtcgatagcgaacgacatggagcattctacatcactgtccacactgactacagattcggcaatacgctcagcctgatcggaagaatagattccttcgtaatcgaggcgtttttgagccgtacgaaccggatcaagagtcaggggtaattttaccttttgcatagggcgcgcatattaactttgtaacgtcatagagtcaaagaaaaaggcaaccagagctgccttttgccaattattcgcacacattgcggcctgtagtttaaaatggctggcatcgatacgctatatctggtgataaaaatatgccaaatctcgtccttgcttccacttcaccttatcgccgaatgctgctggaaaagctcgggatcccgtttgaatgcgctgcgccggaggtggatgaaacgccacagccgggcgagtcaccgcgtcatctggttacccgtctcgcgaaagagaaagcacagtcgctggccgtacgctaccccgcacatctgattataggctccgatcaggtttgtgtgctggacggcgaaattaccggcaaaccgcatacggaagaaaacgcctgccagcagcttttgcgtgcgcgaggcagtatcgtgaccttttataccggcctggcgctttataattcggcttccggtcatctgcaaaccgagtgcgagccgtttgatgtgcacttccgtcatcttagcgagcaggagattatggattatgttcgtcgggaacgtccgctgaactgtgcagggagctttaaaagtgaaggactagggattgcgttgttcgacaagctcgatggccgcgatcccaacacgctggtggggttgccgctgattgcgttgtgccagatgttaaggcgagaagagtgtaatccgctgacgatgtgatccctgcggcctgatgnnnnnnnnnnnnnnnnnnnnnnnnnnnnnnnnnnnnnnnnnnnnnnnnnnnnnnnnnnnnnnnnnnnnnnnnnnnnnnnnnnnnnnnnnnnnnnnnnnnnnnnnnnnnnnnnnnnnnnnnnnnnnnnnnnnnnnnnnnnnnnnnnnnnnnnnnnnnnnnnnnnnnnnnnnnnnnnnnnnnnnnnnnnnnnnnnnnnnnnnnnnnnnnnnnnnnnnnnnnnnnnnnnnnnnnnnnnnnnnnnnnnnnnnnnnnnnnnnnnnnnnnnnnnnnnnnnnnnnnnnnnnnnnnnnnnnnnnnnnnnnnnnnnnnnnnnnnnnnnnnnnnnnnnnnttgagctgctcatccagcggcgcttcaatacggataacttcaccggtattaggatgggtaaatttcagcgctgccgcgtgcaggaacagacgcgacagccctgttcccgccagctgcttatcaaattcgcgatcgccatagcggtcatcaaacgcaatcggatgacccgcaaactgggtatggacgcgaatctggtgggtacgccccgtcaccggactacagcgcaccagcgtggcgaattcgtagcgctcttcaactttaaagcgcgtctcagacggtttcccttcctgattaacacgaacaatgcgctcgccgctttgcagaatatttttcagcagcggcgcctgcaccactttcacgtgggactgccactggccgcgcaccagcgccagataatctttctgcatccctttttcgcgcagctgttcatgcagtgaacgcagcgcagaacgttttttcgccaccagcagcacgccggacgtgtcgcggtcaaggcgatgcaccagctccaggaagcgtgcttccgggcgcaacgcgcgcagcccttcaattaccccaaagctcaggccgctgccgccatgtaccgccgtgcctgacggtttgttcagcacgagaatatggtcgtcctcataaaggatgacatcattcagcgcagccaccttttgcagcttaggtgaaaccacttcttcctcgcgttcggcaacacgcaccggcgggatacgcacttcatcaccggcttcgagcttgtactcgggcttcacgcgttttttgttcacccgcacctcgcccttacgcaagatgcgataaatcatactttttggcacgcccttcaactgggtgcgcaaaaaattatcgatacgttgccccgcctcgtcgtcggcgatggcaaccatttttacggctggagtctctgttttcatggttggcgattctaaatagcgtcagacattagcgccactcatttttctatgcttatatttacttttatccggaccactcccctttcgcgcaatcgatttggtggttattaaaccaatcaccccgttgaagtgaagaaactgtgagtaaccgggtgataattggcaaaagtcatcttgctataacccggcgagcagtggaataatgaatccgttttccgcgttaaatccgggttttgtaaggatgtcgacggaatgaccaattttgtctgaccgatcatccacgcagcaatggcgtaagacgtattgatctttcaggcagttagcgggctgcgggttgcagtacttcccggtataaggattgttctctggagagttttcccaggcaattcccctgataattgcgctgtgtttccgtatgaaacacaggcaaccgacactctgcgcctcttaagcgagcgacaaccgtgaggttggcgacgtgaatagacacgaggccatcggttcataccccggaaagcgtcaccttgcccgcagctttgtcgtcaatgtaagaataacgagtaagttacgatgaaaagaatgttaatcaacgcaactcagcaagaagagttgcgtgtcgcccttgtggatgggcagcgcctgtacgatctggatatcgaaagtcctggacacgaacagaaaaaagcgaacatttacaaaggcaaaatcacccgcattgaaccaagccttgaagctgcatttgtcgattacggtgctgagcgtcacggtttccttcctctcaaagaaatcgcccgcgaatattttcctgcaaactacaactcccatggccgtccgaacattaaagatgttctgcgtgaaggtcaggaagttatcgtccagatcgataaagaagagcgtggcaacaaaggtgccgcactgaccacctttatcagcctggcaggaagctatctggtattgatgccaaacaacccgcgtgcgggtggcatctctcgccgtatcgaaggcgatgaccgtaccgagctgaaagaagcgctggcaagtctcgagctgccagacggcatgggccttatcgtgcgcaccgcaggcgtcggcaaatctgccgaagcgttgcagtgggacctgagcttccgtctgaagcactgggaagccatcaagaaagcggctgagagccgtcctgctccgttcctgatccaccaggaaagcaacgttattgtgcgtgccttccgtgattatctacgtcaggacatcggtgaaattctgattgataacccgaaagtgcttgagctggctcgccagcacatcgccgcgctgggtcgcccggatttcaccagcaaaattaaactgtacaccggtgaaatcccgctgttcagccactatcagattnnnnnnnnnnnnnnnnnnnnnnnnnnnnnnnnnnnnnnnnnnnnnnnnnnnnnnnnnnnnnnnnnnnnnnnnnnnnnnnnnnnnnnnnnnnnnnnnnnnnnnnnnnnnnnnnnnnnnnnnnnnnnnnnnnnnnnnnnnnnnnnnnnnnnnnnnnnnnnnnnnnnnnnnnnnnnnnnnnnnnnnnnnnnnnnnnnnnnnnnnnnnnnnnnnnnnnnnnnnnnnnnnnnnnnnnnnnnnnnnnnnnnnnnnnnnnnnnnnnnnnnnnnnnnnnnnnnnnnnnnnnnnnnnnnnnnnnnnnnnnnnnnnnnnnnnnnnnnnnnnnnnnnnnnnnnnnnnnnnnnnnnnnnnnnnnnnnnnnnnnnnnnnnnnnnnnnnnnnnnnnnnnnnnnnnnnnnnnnnnnnnnnnnnnnnnnnnnnnnnnnnnnnnnnnnnnnnnnnnnnnnnnnnnnnnnnnnnnnnnnnnnnnnnnnnnnnnnnnnnnnnnnnnnnnnnnnnnnnnnnnnnnnnnnnnnnnnnnnnnnnnnnnnnnnnnnnnnnnnnnnnnnnnnnnnnnnnnnnnnnnnnnnnnnnnnnnnnnnnnnnnnnnnnnnnnnnnnnnnnnnnnnnnnnnnnnnnnnnnnnnnnnnnnnnnnnnnnnnnnnnnnnnnnnnnnnnnnnnnnnnnnnnnnnnnnnnnnnnnnnnnnnnnnnnnnnnnnnnnnnnnnnnnnnnnnnnnnnnnnnnnnnnnnnnnnnnnnnnnnnnnnnnnnnnnnnnnnnnnnnnnnnnnnnnnnnnnnnnnnnnnnnnnnnnnnnnnnnnnnnnnnnnnnnaccaccgaagcgctgaccgctatcgacatcaactccgcgcgtgcaacccgcggcggcgacatcgaagagaccgccttcaacaccaaccttgaagccgctgatgaaatcgcccgccagctccgcctgcgcgacctgggtggtctgattgttatcgacttcatcgacatgaccccggttcgccaccagcgtgcggttgaaaaccgtctgcgtgaagcggtacgccaggatcgcgcacgtatccagattagccatatctcgcgcttcggcctgctggaaatgtcccgtcagcgtctgagcccgtcactcggcgagtccagccatcacgtctgcccgcgctgttccggtacgggtaccgtgcgtgacaatgaatcgctctccctctctattctgcgtctgattgaagaagaagcgctgaaagagaacaccaaagaggttcacgccatcgttccggtgccaattgcctcctacctgctgaacgaaaaacgtgcggcggtgagcgcaatcgaagcgcgtcagggcggcgttcgctgcatcatcgtgccaaacgacgagatgcaaaccccgcactatcacgtgctgcgcgtgcgtaaaggcgaagagacaagcaccctcagctacctgctgccgaagctgcatgaagaagaaatggcgctgccatcggatgaagagcctgccgagcgtaaactgcctgagcagcctgcattagcaaccttcatcatgcctgaagccccaccggaagcgacgctggaaaaaccagcggcaaaacctgccgtgcaaaaggcggcccctgccgcgccaaaagcgcagcctgagcagccgggtcccctgagccgcatcttcggcgcgttgaaaaaaatgtttgctggcgaagaagttcagcctgagcagccgaaagaagcgccaaaagaagcgaaaccagagcgtcagcaggaccgtcgtaagcgtcagaacaatcgtcgcgatcgtaatgaccgcaacgaccgtagcgatcgtaacgagcgccgtgataatcgttccgagaacaacgaaggtcgtgaacaacgcgaggacaaccgtcgcaaccgtcgcgagaagcaacagcagaacgttgaagatcgtgagattcgccagcaggcgggcgatgagtccgagaagagcaaacagcgtgacgagcagcaacctcgccgcgagcgtaaccgtcgtcgtaacgacgagaaacgccaggcccagcaggaagtcaaaaacctgaaccgcgaagcgcctgttgaacagcaggacacggagcaggaagagcgtactcaggttatgccgcgtcgtaagcagcgtcagctgacccagaaagtacgtgtgggtgctgttcagacggaagaaaacgacgttatcgcggttgaagcagcagaaagcacaacgggtacccaggttgcaaaagttgacctgccagccgtagtggaaaatcaggttgagcaggacgaaagcagcgaaaaccgtgacaacgcaggtatgccgcgtcgctcccgccgttctccacgtcacctgcgcgtgagcggccagcgtcgtcgtcgctaccgtgacgagcgttacccgactcagtcgccaatgccgctgaccgtggcgtgcgcgtcacctgagatggcatccggtaaagtctggatccgttatccggttgctcgcccagagcaggctgttgaagaacaggctgtgaccgaagaggtgattgcaccggtagcagcggtggaagacgtcgtgactgaagcggcaaccgtggttgaaccgcaagttgttgacacggcggcaccgcaggctgtggaagtggaaacgacccatcctgaagtgattgctgcgccggttgatgccgccccgcagatcattgccgaagaagataccgtggtggctgaagaagtcgcggaggaagctgagccggtctccgcagcagaagagcccgcagacgttaccgtcgaaacggtgacggaagaggttgttcaggacgtcgagattcaggttgaacctgttgtcgaagaggtcaaagcgcctgaagtgaaatccgagccggttgaggtcgttgccgctccagcgcctgctcacgttgctaccgcgccgatgactcgcgccccggcacctgagtatgtacctgaagcgccacgccatagcgactgggttcgtccggcattcaacttcgaaggcaaaggtgctgccggtggtcacagtgcaacgcacatggctactgcgccagctactcgtcctcagcctgttgaataacgcacgctaagactgaaagccgaccttcgggtcggcttttttatggctgttgcaggggctttctcattccggtgacctccggcattatctgccgcatcagctccagaaaacgccgcaagcgcgccggataataacgagaccaggggtaaaccagatgtaccggtaacgctgccggctgccactctggcagtagatgcaccagtcttccttcctgaatatcatcctgtactgtccagctggataccaccgccacgccgagcccggtgagtgccgtattgcgcgccacatacaggctgtcggtactcaggcgtggcgtaatggtaacccgcgccggggcagatgatgcatcgtggaaaagctccacatggcgttgataaaaagagctgatggcaatccagggaagctgctgcaaatcttccggcgttttaaccgcgggataacgggccagtaattccggtgaagccaccaccgagcgcggcacttcagccagcagcacggacacggttgccggatcgacttccacacccacccgaatagcacagtcaaggttgtcgccgaggaaatcaaccgagcgatcgttgagcatccactcaacagaaagctggggatagcgctgtaaaaattcggttaacggtttcagaagctgatcctggccaaacgcgtgcggggcgcgcaccctcagcaccccaaccggttcatcttccgtctgctctacctcgtcttccagcgccagccagctgtcaatcacccgtcgggcatgctgatagcagcgttcgccgtcatcggtcagccgggtcgtatgggttgtgcgcagcatcaggcgtactcccagcatggtctcaagcgactgcaaccgtcggctcaccgtggcctgggttgttgccagctgacgtgccgccgcagaaagagaccccgcctccacaatgcgaacaaacgttcgcatcagttctacccgatctatacgctcagacgttttcataccatttttacccatacgccacacgtataagcgttttaccaccgcgcccgctaccgtcgcaaggcgtactgataaaaaatagccgcacacgacgaatgaggaacatcttatgaacacaactaccacccgggccgtaagccgctgggtaatcttaatgctggcgctcggtgcgggctttagcgtggcatccatctattatgcccagcctctgctgccgctgatgggctcagacctgcatctgagcatcgaaggcatgggcttggtcccgacgctcacccaggcgggttatgccctgggcatcctgtttctgctcccgctcggcgatcgtcatgaccgcagaacgctgatcctgataaaaagtgcggccctggcgctgttcctgctgggttgtagcctgaccggacaactgcactccctgctgctcaccagcctgctgattggcatggccgccaccatggcgcaggatattgtcccggccgcagcgatcctcgcgccggaaggcaaacagggaaaaacggtcggcacggtgatgaccggcctgctgctggggattttgctctccagaaccgtgagcggcgtggtgggtgaggcctttggctggcgggtgatgtatcagcttgccgccacaagtattgcctttattggcgtggtgatgtgggccgtgcttcccnnnnnnnnnnnnnnnnnnnnnnnnnnnnnnnnnnnnnnnnnnnnnnnnnnnnnnnnnnnnnnnnnnnnnnnnnnnnnnnnnnnnnnnnnnnnnnnnnnnnnnnnnnnnnnnnnnnnnnnnnnnnnnnnnnnnnnnnnnnnnnnnnnnnnnnnnnnnnnnnnnnnnnnnnnnnnnnnnnnnnnnnnnnnnnnnnnnnnnnnnnnnnnnnnnnnnnnnnnnnnnnnnnnnnnnnnnnnnnnnnnnnnnnnnnnnnnnnnnnnnnnnnnnnnnnnnnnnnnnnnnnnnnnnnnnnnnnnnnnnnnnnnnnnnnnnnnnnnnnnnnnnnnnnnnnnnnnnnnnnnnnnnnnnnnnnnnnnnnnnnnnnnnnnnnnnnnnnnnnnnnnnnnnnnnnnnnnnnnnnnnnnnnnnnnnnnnnnnnnnnnnnnnnnnnnnnnnnnnnnnnnnnnnnnnncttcgccgttcactccacgctgagctacccggcgctgatgcgctccatggaacacctctggcgtcgttacccggcgctgcgtcgggccgcgctggcccagggttttctgtcgattgcctttagcgcattctggtcaacgctggcggtcatgctgctggaacggtataaccttggcagtgccgtagcgggtggatttggtattgccggagccgctggcgcgctggctgcaccgctggcagggggtctggcagataagctgggcgccggtaaagtgacccagttgggtgccgcgctggtgaccctctcgtttgccctgatgttcctgatgccggcactgggtgtacacggtcagttgatcctgatttccctctcagcggtcggtttcgatctcggcttgcagtccagcctcgtggcccaccagaacctggtctacagccttgagccgcaggcccgcggacgcctgaacgccctgctgtttaccgtcattttcatcggaatggcgctgggttcggcattaggcagcaatatctatacgctggcaggctggtctggcgtggtggctctggcaaccctgtgtggtgccattgcgctggctatcagagtgattgaaagcgcccgggtgctgtccgcacaggcagaaagtgtgtaaaaaaaatgcccaacccggacgggttgggcagtcaaaacatgcccagtttcaagacatgtcaaacaggtcagaatcttatttgttcatctggaacaaagacataccctgcatatcgctaaaggctttatacgaggcctgcaacgccgcttgctgcatggtgtaggacgaaatcaccgagttccagtccacgtcaaccaggttactcatctgctgcgtctgacccagcgcgcggtcttcacccagagcgtccagcttgcccagctcatccagcttgatgccgaggtcggcgcgcacggtcagcacgttgttgagggagttgctcaggccacggttggctttatcaatagccgccgtaaacgcctcggctttcgtttcatcctccccaatcggcgtattcagcgcttcaattgcggagtcaaggatcttgaacaaattcgtttccggcgcactaccatctggctctggcttcgcattgctggtgaagctatcgaaaacttcagtgcccgtatggctaatttgcatcgtgcgcgcggagtcaacctgctggctgattggcgttccgccgcccttataatcacccgtagtctggtcgaaagccgccgcttcggtcttgtaaccggaaaaaatatagcgaccattaccgtccgtgctgttagccaggttcatgagctgatcgcgaataccttgcaggttcgttgccagcgaagcgcggtcatcgtcacttaacgtaccgttgcccgcattgacaattttttcctgagcagcctggatggcggttgtcacttgcgataacacgttttcttccagcgagactttcgtcgtagcgaaagaacgtgccagcgcatactggctgttttgcgtttgggcctgagagagcacaacggcctgcgaggcggcaatcggatcgtcagacggacggttgatgcgcttccccgtagacatctgctcgccgtagctgagccagagactttgggagttcgtcacgccgcgcatgctttgctcatacatcatttgagtactaatacgcattttttatgcctcagccttagcggatattgatcaatgcatcaaacagcgtgctcgccgtttgcagcacctgcgcattcgccagatagtactgctgatagcgttgcaggttgccatactcttcatccaggttaaccccggagattgactgctgttgtttggtcagctgcgtcaccacgttaactttggtttcgctgctggttttcagcgacgccgtggtgctgcccaccgtactgaccagcgcggcataagcatcgttaaaggttttgttccctcccaccaatttggcgctctgtaaatccagcagcttctggccattggtattgtcgctttcgccgtttcctttcgcggaggccatcgccagtttggattcgtcgctgatcgctacgtccatattcacaatgacgtcattcaccggtttgacgatgaaactgtctttattatcggctgagccgctaatcttaacgttgagaccatcaaacgacagattaccgctggcgtcaggcttggccgtgaagctggtgttgtccgacagacgcgtgattgtccagtcagtaccgttgtactcaactttatagtttgtcgcctggacctttgtactgtccgtcatcgtggccgtaacggacgcgcttccggtgtttttaccgttactcagcactgccggagagccaaaatcaaacagcttgccgcctgcatccccgttggcatcaaagccagcctggtgctgggtattcatggcatccgcaaacgccagcgccatctggttaagggtgtttcgcgcctgatccagatcctgagaacggaacgttaacagccccccaagcgaccccgtggtgatctgtttttctgagatctccacgttgcccgcagcggcatccacatacgcaattgttgtacgcgctgggtccgcactggatttcaccgccgccagctggctggcgttgctgccctgtaccagggtgtaaccgttggcgatagagatgttgtaggtgccgctgtcctgtacggtgacgtccacaccgacaatcttgttcagttcactcaccagctgatcgcgctgatcgagcagttcattcggggatgcgcccgcaccgacgccagtcagccgggagatctgatcgttaagattggcaatctgtttcgcgtagttattgatctgatcgacgctggtagaaatcgccgtattgacctgcgcatcctgatcgcggagatattgatcgttggttttaaactggtttaccagaccatccgccttcccgagtaccgtctggcgtgcagccggatcttctgcgttactcaccagcgtttgcaggcttttaaagaaatcctggaggttggcagaaagcgagttcgtggtatcagaaagcacgtcgtcaatttttgacatctgctggtagcgcgtggtcagcccactgctctggttctgcgccgcgcgcagctggttggtgataaacgcatcatattcacgctgaacaccggagacatagaccccgttacccacccagccaccgccggtcagggtgctgtttgaagcccccagaatggtggtctggcgggtataacctgccacgttgtagcttgaaatattattactgacggtattgagtgccgactgcgcagcactgaggccactcatggcgctgttaatcaaactggacatgggggttccttttatacgttcagacacgagtcctgatgaaggttatcggcaacctccaccgggacttgagaactttcagaacagattttcgagatctgtgctatacgctttgctgaccttctcagacatggatttcagctgctggatcatgctggtcagcttgcgcgcataatttggatcggtcgcgtagccagcattctgcaatgcctgagcgccctgctctggcgtggcggcctgggtcacggcggtgtagcgcggattccggctcaacagcccgacataatccgacaacgcttccagatacgagctgtagacgcggaatttggctttcaccttcactgccgcaccgttctcatattcggtggtggtgatttccgtggtcggccccttccagctggaggtggccttcacgccaaagatgttgaagctcggctcaccgttctccctgcggatttgacgttgcccccagcccgactccagcgccgcctgcgccagaatcagatggtgcggcacgccgctctcttcactggcaagacgcgccggcagggagagctgcgccaggaagtctttgctgtcgccggagagcggctcgtcacgcgtttctgtcggcttcggcatcgccttacgcaccatctgcgtcagcgcctgattttgataactggtcaccttttccagatcaaacttcagcggcacctgcggcggggcctcttcaggcgggagcccctgtgcggctgcggtctgcttcacaatcatgtccgccaggccgagtccctttccggcggtcatttgctgggcaatctgctgatcgtacatgctggtgtaaagccgcgtggaatcactgctgaacatgccatctttcggcagggtttcacgcatgcttttcaacatcatctgtacgaacatgccttccacctgacgggcaaccgggcggatattcgccgccggatccttgcccgctttggttttcagctcgttgagcgactgggcatcccaggcggcactggtcaacagtttgctatcggtcagcatttagatgatttccagtctggcgcgcaggcagcctgcactttgcatggattgcagaatggacatcagatccattggcgttgcacccagcgcattcagagcacgcaccacgctgttcagattggcgctggagcgcacactctgcaacgaaccgccgctctgtcgtaaatcaatctgcgtttgcggggtcactaccgtctgaccgccaccaaacggggtatccggctggctgacgttggccgagcggttaaccgtgacggagagattgccctgcgccacggcgcagctgtccagcgtcacttcccggttcatcaccaccgagccggtacgggagttgataatgactttcgcatcctgcaccggcacgttcacttccatattctggatatcggccagcatccgcacctggttgctgctgccggttgacgtgcggatctgcacggtacgggcatccagcgcggtggcgctgccgtagccccggctgcggttgatggtgtcagcgatctgctgcgccatcgtaaagtcttcgttattcagttgcaggttaatggtgttgccggtgccgaactgggtcggcagctcacgttcgatgatcgcgccgttggtaatacgtcccccgttcagctggttcacctgcacgctgctgccgcccgccgacgcgcctgctccgccaaccagaatgttgccctgcgccagagcatacacctggctgtcgacgcctttcagcggcgtcatcagcaacgtaccgccgcgcaggcttttggcgttacccatcgacgagacaaccacgtcgatggtctgcccctgacgcgcaaaggccggataagacgcggtcaccatcacggccgccacgtttttcagctgcatgttggtcccggccggtacggtaataccgagctgcgagagcatgttgttcaggctctgggtggtgaacggcgtctgggtcgtctggtcacccgtcccatccagccccaccaccaggccatagccaatcagggagttttcgcgcacgccctgcacgctggtgagatcgcgtatgcgatcggcctgcgcaacggtagcgaccagcgacagcgccacggcgaagagaaatttatacataggtcacctcgcttacatcggcgataagttaaggaagaagcgttgcagccagcccatattttgcgcttcgttgatgtagccgttgccgacgtactcaatgcgcgcatccgccacctgggtggacggtacggtgttggtgccgctgatggtgcgagggttaaccacaccggagaagcgaatgaattccgtaccctggttaatggcgatctgtttttcgcccaccacgtgcaggttgccgttcaccagaacctggtcaaccgtaaccgtcagcgttccgctgaaggtgttgctggcgttcgcgccacctttaccgttaaaggtgttgccgccggaggcttccacatccgcacgggcgttgccgaacagcccttgcagatagcgcggtacggtgtcgaagccaaaattggttttgccgtcgcggctggcgttcgccgacgagctcttactcgcactgacgttttcctgcaacacaatggtcagcgtatcgccaacgttacgcggacgacggtcttcaaacagcggctgataaccgtagttaatcggctgcgcggtctggaaaatagagccgttcaccaccggcgcggggccgggaacgggttgggcggtagtcgcaccctgtaccaatggtttagacgggatccaggcacacccgctgagggtaacggccagaacagtcaggatcggataacgaaacgccgcgtttttttgcattgccttcatcttcgaaaacagggagccggtgcgacgtttaccgcaccgggctacaccttagagttgcgtcagtttttgcagcatctggtcggtcgtcgacactgctttactgttaatttcataggcgcgctggacctggatcatattcaccagctcttccgccacgttaacgttcgaggtttccacatacccctgatacagcagccccgccccgttcaggcccggggtactttcatttggcgtgccggaagactgcgtttcggtgtagaggttctcgccgatgctttccagtccggtatcgttcatgaaggtggtcaggttgagctgtccaacctggaccggcgcggcctgaccttgctgagttacgctgacgataccgtcacgaccaatggtgatactcagcgcgttcgccgggatggtgatcgcaggctgaacctggaaaccgcccgccgtcaccagttgaccattctgatccacctggaacgaaccatcgcgggtataggcggaggtcccgtcaggcagttgcacctggaagaaaccctgacctttgatggcaacgtctttactgttgttggtctgggacaggttgccctggctgtgcagacgctcggtggcgaccgggcgcacgccggtaccaatttgcagaccggacggcagcgtggtttgctcagaagactgcgcccctggctgacgaatcgtttggtaaagcaaatcttcgaaaaccgcacgctggcgcttaaaaccgttggtgctgacgtttgccaggttgttggcaatcacatccatattggtttgctgtgcgtccagaccggttttcgcgatccataaagaactgatcatagggagtcctgttaactcatagccagaagttggttagccttgcctgcgttttcatcgacgctgctgatgattttcatctgcatttcgaagcggcgggcgctggcgatcatgtcggtcatggcttccaccggtttgacgttactgccttccagcacgccggacatcacgcggatggtcgggtcggcctgtaacgtggcgccacgtgtggcctgcgccgcctgggtcagacggaacatcccgtcatcgccacgctgcacttcgttgccttcggctttcaccagcttcagacgaccgacaggcgcaacggtgttagccgggtcacccgggtttaacgccgagatcgtcccgtctgccgcaatggtcagctctgacccttccggcaccgtcaacggaccggcttcgcccatcaccggatgcccctgaatcgtcagctgcccggtggcgctcacctggatattaccgttgcgggtatacccttccccgccgtcagccgtttgcaccgccagccagccgtcctgctgaagggcaacgtccagcggacgcgcggtgtaatccatctggcctggcgtcatgtcggcgcccggcgtggaggcggtgaccagcgtacgcgtgggcaatgacagcccttctaccggcaccgcacgcagcgcgttgagctgcgcacgaaaacctggcgtggaagcgttcgcaaggttgctggcggtaacagcctgctggttgagcgtctggcttgctgcgcccatcgctgtatatattgcgtgatccattgcgctttcccgtcagctgcttaacgcaggttaaccagcgtgttgaggatctgatcctgggttttgatggtctgcgcgttggactggtagttacgttgcgcaacgatcatgttcaccagctctttactcagatcgacgttggaggcttccagcgcaccgttagtcagcgtgccgaagttaccggaacccgcggttcccagcagggcaacaccggaagactgcgtggcagaccagacgttatccccttcggatttcaggccttcgttgttagcaaagtttgccagcacgatctggcccagcacctgggtctgttcgttcgaatagttaccgacaacggtaccgtcatcgttgatctggtagctcaccagatcgcccggcttatagccgttctggctcgtcgccacgatattgttcgcaccggtgttttgctgcatggagttggcgaaactcatgtcaaacgtggctggcgtcgcgcccggaacggtgcccgttgtgatcttgatatcatcgccacccgtcagcacaccactctcgttaaaggtcagcgtggttgccagtttcgctgcatctcccgctacgctgccatcctgcgaatacaccttccaggagttagctggcgtctcgtttttgacataaaacaggttcatgttgtgcgcattaccctggctgtcaaacaccgtcacagtgcctttcttgttgtaagagtcagggttggacggatcgaaggcgacggttggcgcggtatcggtggagttcaggttgatctgctgagaggccgtggtggtggacttcgccgccatcagcgtcgttgggatggagatcgcctgcggattcgcaccggtttgcaccgtaggcggcgtgccggcaaccggataaccggttaactgaagcccctgcatgttcaccaggttacggttttcatccagcttaaactggccgttgcggctgtagaacacggaaccgttggcatccaccatacggaagaaaccgttctggctgatggcgacatccagaccgcgaccggtgttggtggtcgtcccgtcggtgaagtcctgggtgatacccgccaccttcacgcccaggcccactttagagcctgcaaacatatctgcaaaagacgcagaaccggatttaaaaccataggtcgcggagttggcgatgttgttgccaatgacgtccaggttggtggccgcagcattcaggccgctgaccgcttgagaaaaggccatgacttactcctgataagtattaaggcttagataatctgccgaacttcgtcgagtgtggtggtaccggaggtacccaaatccagtttgttgccatcgctacccttgatgacgccctgaaccagggcaaactgtagcggctgagccaccagctgagtggtgccgttgctggcgctaatcgcaacctgatacgagccgttaggcgctttagtgccgtcggtcaggctgccatcccaggtaaaggtatgaacgcccgctttaagctcgccaatctcaatcgtgcgcaccacgttgccgctggcgtctttgattgtggcggtgactttgtcggccggctgctgcaactcaacgccaaacggcgtcgtggtggtggtggacgtgccatcggtagtgctggtgcccgccagaatcgtggtccccgggatcatcaccccgtgaccgatcaggttggcggcctgcaaggactggctgttatcgatttgaccagagaccgagccgagcgtggtgttcagtttctcaatgccgctgacggtactgatctgcgcaagctgcgtggtcagttcgttgttctgcatcggattggtcggatcctgatttttcagctgcgccaccagcagggtcagaaagctgctctgtaaatcggaggcattgctcccggtgagagagctggaaccggtcgcactgctggtgctgttgacgccggtatttgtcgggtcattcacgtttacggcgatggacatgcgtgtctcctttactggccgagagtgagtgttttgagcatcatgctcttcacggtattaagcacttcgacgtttgcctggtagctacgcgacgcggacatggagttcaccatctccccgaccacatccacgttcggcattttcacgtagccgctggcatccgcgagcgggttgccaggctcgtaaaccagcttgtcgggtgcctggctctcaaccacgtccgccacttttacgccgcccgttgccgcacccggtgcagcatcaacctggaagacaacctgtttagcgcgatacggttgcccgtcagggccggtcacgctgtcggcgttggccaggttactggcggccacgttcagtcgtttggactgcgccgttaatgccgaaccggcgatatcaaaaatattcagcaaggccatttactaattgcccccctgtaggacggtcatcatgcctttaatttgcccgccgagtagcgtcagacctgtctggtattgcaggctgttatcggcaaactgtgtgcgctcccggtccatgtcgacggtgttaccatcaagtgagggctgatcgggaatacggtaaagcaggtcggtcgttggcgcggtcatcgcctgagcgggaatatgacgtgaggatgtcagggccagtgagacacccgttccttcggcacgtccacgctccatcacttttttgagttcactggaaaaatcaatatcgcgcgcctgatacccgggggtatccgcgttggcgatattggcggctaaaatctcctgccgctgggcgcgtaaattgagcgcttcctgctgaaaacgtaacgcggcgtcgagtttatcgagcatgtctcctccgctgatgagaaaatttcagttcacagcttaaatctcaccccgtctcccctatcgacggaataagcgcaaaatgcgtcgctatttgttgcgttgatggaaaaccactgcgggtagaatttgctaaattctggacatggtggaacgtgcgatgcggacttttaaacgtggcctggcggcgaccctactgcttttaagccctctggtgcaggctgaggggttagaggaccagctcaatgcattctttgcgcagaagctggccggtttcagcgatgacgtacgcgtgaccgtgcgcaccccgcctaacctttatccttcctgcgaagccccgtcatttagcgtgaccggcagcacccgcttatggggcaacgtgaacgtgctggcgcgttgcgccaatgaaaaacgctacttacaggttgcggttcaggcgacgggcaattatgttgtcgccgccgttcccattccccggggcagcctgctgcaacctgacagcgtaacgctgaagcgaggccgtctggatcagcttccaccgcggacgatgctggatatcaaccaagctcaggaggcggtcagcctgcgcgatgtcgctcctggacaggcgatacagctatccatgctgcgccaggcgtggcgggtgaaagcgggacaacaggtgatggtggtcgccaatggcgaaggctttagtatcaacagtgaaggaaaagcgctgaataatgccgcagtggcgcaaaatgcccgggtcagaatgtcctcaggccaggtggtcagcggcacggtcggtcctgatgggaatattctgattaacctgtaatctttttaaagatttcgcggcgactgccgataaatattcaacaaatgatgatgtcaggcgcaaacgccgcgaaccctcgatgaggacaacactatgagcattgatcgtacatcagccctgaagccggttagcactgtacaacctcgcgaaacgaatgaggctgccccgcaaaaaacgcgtctggaaaaaacgtcgacggctaacagcaccagcgtcacgctgagcgatgcccagtcgaagctgatgcagccaggcagcagcgatatcaacatggaacgtgttgaagcgctgaaaacggctatccgtaacggcgaactgaaaatggataccagcaaaatcgctgatgcgctgattcaggacgcacagagtttcctccagagtaactaaccgtatgagtcgactgtcagaaatactggatcagatgacggtggtcctgaacgacctgaaaacggtgatggatgcagaacagcaccacctctcttctggtcaaatcaacggcagcgcgttgcaacgcataactgaagataaaagctcgctgctggcgaccctggattatctggaaaaacagcgacgcgctgagcaagacgcgaaacgcagcgccaatgatgagatcaacgaacgctggcagaccattacagaaaaaacccagcatcttcgcgatctcaaccagcataacggctggctgctggaaggacagattatccgtaatcagcagacgcttgaagtgttaaagccctataaagagccggggctgtacggtgcggatggtcagacggccacggcacgtatcacgggtgggaaaaagatttcgatttgacgcagtagcggcacgtcatgaagcggggagcaccttctggtgaactccccttttggcgtttataccgtgcggcgggtgaactctttcactttgaagccaagcaccgccagcgtggcaaagtacgccaccacaccgaccaccaccacggccatcagacgcatcaggcggtaaggcatggtgccctgcgcccactcaggcatgacatacaacatgccaaccagcgcggccgccatcaccactaccgcaatcgccagacgcagcaggaagcttgcccnnnnnnnnnnnnnnnnnnnnnnnnnnnnnnnnnnnnnnnnnnnnnnnnnnnnnnnnnnnnnnnnnnnnnnnnnnnnnnnnnnnnnnnnnnnnnnnnnnnnnnnnnnnnnnnnnnnnnnnnnnnnnnnnnnnnnnnnnnnnnnnnnnnnnnnnnnnnnnnnnnnnnnnnnnnnnnnnnnnnnnnnnnnnnnnnnnnnnnnnnnnnnnnnnnnnnnnnnnnnnnnnnnnnnnnnnnnnnnnnnnnnnnnnnnnnnnnnnnnnnnnnnnnnnnnnnnnnnnnnnnnnnnnnnnnnnnnnnnnnnnnnnnnnnnnnnnnnnnnnnnnnnnnnnnnnnnnnnnnnnnnnnnnnnnnnnnnnnnnnnnnnnnnnnnnnnnnnnnnnnnnnnnnnnnnnnnnnnnnnnnnnnnnnnnnnnnnnnnnnnnnnnnnnnnnnnnnnnnnnnnnnnnnnnnnnnnnnnnnnnnnnnnnnnnnnnnnnnnnnnnnnnnnnntgtgaagatatcctgcttgcgcagctgccagtacagcagcccggcgttcagacaggccgccagaccaatcgacaatgacagccccgcgtgtttcagcggtccaataaacgccaggttcatcagctgcgtcatgatcagcgtcacaatggcaatcttaaccggcgttttgatgtcctgacgtgaatagaaaccgggcgcaagcaccttcacgacaatcagccccatcagccccaccgagtaggctacgagcgcacgctgggtcatggcggcatcaaaggcggtgaattttccatactggaacaatgaaaccgtcagcggttttgccaggatccccagcgccaccgcgcttggcagcgccagcagaaaacagagacgcaggccccagtccatcaggcggcagtattcatcgtggttgccgctggcgaaacttttcgacagcgacggcagcagaatagtccccagcgccacgcccagcaccccggatggaaactccatcagacgatcggcgtagtacatccaggacaccgagcccgacaccaggaaagaggcgaagatggtattgatgatcagcgagatctggctaacggacacgccgagtatcgccggtcccatctgtttgataacgcgcattgagcccgcatctttgaaattaatgcgcggcagaaccagcatgccgatctttttcagatgcggaagctggtaagcaagctgtagcacgccgccgacggtcacggcccaggccagcgccagcaccggtgggttaaaatgcggcgcggcgaacagcgcaaagccaatcatgctgacgttgaggaacgtgggggcaaaggccggaacggagaagcggttccaggtattcaggatggcacccaccagcgacgccagcgaaatcagcagaatataggggaaggttatacgcagcagttgcgtggtcagggcaaatttatccgccgtgtctgcaaaacccggcgccgtcaccatgatcacccagggtgctgccagcatccccaggacggtcacgatcgccagcgccagcgtcagtaatccggaaacgtaggccacaaagacgcgggtggcatcttcgccctgcttgcttttatattctgcgaggatcggaacgaatgcctgtgagaaggccccttcggcaaaaatacggcgcagcaggtttggcagcttaaaagcgacgaaaaaggcgtcagtcgccatcccggcgccaaaaacccttgccacaatggcatcgcgcgcaaagccaagcacgcgggaaaacatggtcatcgagctgacggccgccagcgattttaataagttcattaacgtgaagttccacaaccctacggatttccaggacggataagcgaaagcgccacccggcaaagccaacaagcggcgcttagtctaaccggatttcaacgaattactatcggcagatgttacagcgcgttattccgacatggcttcgcgccagagtcgttccacaatgcgctgcgccagaatagcctgctccccggacgtttcaggaaccgtctgattctgcacgcaggtgatgaagtgacgcgcgcagcccacaaagccacgctgctccagggtgctttgccagccgggaaccggtaacgcgaccacgccattgcccttctcttcccgccactctcgcatatcggtgacgtcatacagcgcgccatccgtaacggcctgcacggactcgcgctggctgcccgcccgacgatgcatgctggtcgtcacctgcaaatgctcaacggcaaaatgatgttcggcgtaaaccatctcaccctgctcgttggtcagcagcgtgccgctttgcagctgggcttttccgttactcagccacagggccgtatccacgacgtggagataatcatccagcagcgtgaagtgcagatcgttcggccccacgctgtcggtacggtgcttatccatacgcagagaggcgaacgagccggactgcgctttaagctgctgatagagcggcgcaaaacggcggttgaagccgaccatcagcgtcagctttttacgcgcggccagctcaatcagtcgctcagcatcctgtacattttccgccaggggtttatccacgcagacgtgaacgcctgcgttaagcaactcgctcaccacctggtagtgcgtcgcggttgaggtatgcacaaataccgcatcacattcacgggctaaatcctgtagcgaaccggcataagggatgcgccaggttttgcagatgcgctctgctttctcgcgggtgggcgaccacgccccttgcagcgtccagtcggacgcggcgcctaaaacgggcagccaggctttttgcgcgatccctcccagccccacaacaccaatgcgtaatgttgtcacgattaatctcccagatgtgcgagtaacgcatccagacgctgcttcagcccggcaacctcgtcttccagggctgccacgcgcgcggtcaggctgtcgtttgatgctggcgtgtcggattctacggccagcgcagagggctcaacgtcgccgctaaacaggtgcatgtagcggctttcacgcttacccggctcgcgtggcagacgcaccacgtaaggaccgtcctcgcgtgaggctagtcgctccagcgtctgttcaacgtcctgcatatcctgaaactcatgcatgcgggaggcgcgcgtgcgcagttcacccggcgtctgcgccccgcgcagcagcagcgtggtgatcactgccacttccgcggcgctgagttttaaatcgccaaattcggaattacaaaagcgctgttcatatttagtgacgcgattaccgaagccgctgacggtgcgcaggtagtggcgcttcaccagctcatcaaggatatcctgcacctcgtgctcgccaaggttcatcaccggctcacggttcgtcttctggttgctggccatcgtgacggcattcacggacagaggatactgttccggcgtggtgacctgcttttccagaaggcagccgatcacgcgcgcttcggcgccatttaactgatatttcattttttctccttaacgacccgcggtccactcctgggtggtgagcgcggtgagcacatggtcccgccactcgccgtcaatcagcagataatctttggcatagccctctttctcaaaccccaggcgggccagcagatcgccgctgcgcttattgtgcggcatgtagttggccataatgcgatggatatgttgcgtgcgctgcatgtagcgaatcgccgccgtaagcgcctcaaacatgagcccctgcccctgccatttctgaccgatggaatacccgaggtaacaggcgtgaaacgacccgcgtaccacgtttgaaaaattggcaatgccaacgatctctttctcttccggatcgagaagcgcgaaataaaacgcacttccctgtttatgaaattccgcaatcatactgaggcgcgcctgccagccagaggggtagcagtggctctcgtcccgaacgggttcccagggttttaaaaactggcgattctcggcgtaataatccgccagacgccaggcatcacgctcatgcaccagacgaacgaccagcctgtccgtcgtcagacgcacttttggcacattactgcgatagccaaacatcgttaccactccttcccgtcgcttctgctctgcctgttagctttactatacctgcgcctgtgccttctgtgaaaacagtgacataccattttgatcgcttttcacatttttcgatgagaactctctatcaaagcacctttttgataaaaaaatattgtcgccagcgggtatgggaaaaagcgcggcgacaccgcagaatgttagcgtgctcaccttttattttccctggagggaaaatgtcccgcgtatcacaggccaggagcctgggtaaatatttcctgctcgtcgataacatgctggtcgtgctcggcttttttgtcgtttttccgcttatatcgattcgttttgtcgatcaaatgggctgggcggcattgatggtcgggatcgcgctgggtctacgccagtttgtacaacagggtctgggcgtgtttggcggcgcaatagccgaccgcttcggcgcgaaaccgatgatcgtcaccggcatgctgttacgtgcggcgggattcgccaccatggcaatcgctcatgaaccctggctgctgtggttctcctgtttcctttccgggattggcggcacccttttcgacccaccgcgtaccgcgctggtggttaagcttatccgtccgcaacatcgggggcgcttcttctcgattttgatgatgcaggacagcgctggcgcggtggtgggcgccctgctgggaagctggctgctgcaatacgatttccgcctggtctgcgccaccggcgcggtgttgtttattctctgcgcgctgtttaacggtctgtttctgcccgcatggaagctgtcgacggtgaaagcacctgtgcgggaagggcttgaccgtgtgctaagcgataaacgcttcgtcacctatgtgttaaccctgaccggctactacatgctcgccgtgcaggtcatgctgatgctgcccattatggttaacgatattgccggcacgccggcagcggtgaaatggatgtatgccattgaggcctgcctctctctgacgctgctctatccgattgcccgctggagcgagcgccgtttccggcttgagcaccgtctgatggccgggctgttgctgatgacgctgagcatgatgcccatcggcctggtgagttcgcttcagcaactgtttatgctcatctgcaccttctatattggctcaatcattgccgagccagcccgtgaaacgctgagcgcgtcacttgccgacgcccgggcccgcggcagctacatgggcttcagccgtctcgggctggcgcttggcggcgcactgggttacaccggtggcggctggctgtttgatgccggaaaagcgctccatcagccggagctgccgtgggtcatgctcggcatggtcggctttatgacgctgattgccctctggtggcagttcagtgataaacgcagcacccgcgggatgctggagcctggcgcctgaccctctttcactatcagttttttctgctggtttctgttggatcaccctgacatactggcgtatcaggacagatgcgccgattttatgttgaggaacgccatgaaaaagatcgttattgccgctgcgttaattgtcagtggtctgctggtgggatgtaaccagcttacgcagtacaccgtcagtgagcaggaaattaatcaggcgctggaaaaacataataacttttcaaaagatatcggcgtgcccggccttgcggatgcgcatatcatcctgacgaatctcgccagccagattgggcgcgaggagcctaacaaagtcaccctttccggcgatgccagcctcgatatgacctcgctcttcggcaatcagaaagcggatatcaagctgaagctcaaggcgctgccggtcttcaataaagagaaaggggccattttcctgcaagagatggaaatcgtcgatgcagttgtgacgccggaaaaaatgaaaccggtgctgcaaacgctgatgccgtatctcaaccagtcgttgcagaactactttaaccaacagcctgcctatgttctgagcgaagacaagagcaaaggcgaatctctggcgaaaaaatatgccaaagggatagaggtgaaaccgggtgaaatcatcatccctttcaccgactaaacactccgggcgctcaggcgcccgttttttttaacggaatagtgtgcaaacgaaaacgtttccgcttatgatttgtgtccggcaaaaacagccctcttatgactgatctctttcaagccggagcttccatgactgtacaatcccaggttctcaaaatccgccgcccagacgactggcatatccatcttcgtgatggcgacatgctgaaaaccgtcgtgccgtataccagcgaaatttatggccgtgcgattgttatgcctaacctggttccgccagtcactaccgtcgaggccgcgattgcctatcgccagcgtatccttgacgccgttccggccggacacgattttaccccattgatgacctgctacctgacggactcgctggatccgaatgaagttgagcgcgggtttaacgaagatgtattcaccgccgcgaagctctacccggcgaatgccaccaccaactccagccatggggtgaccagtattgatgccatcatgcctgttctggagcgtatgcaaaaactgggcatgccgctgctggtgcacggggaagtgacccacgctgacattgatattttcgatcgcgaagcacgttttatcgaaacggtcatggagccgctgcgccagcgtcttccggggctgaaagtggtgtttgaacacattacgactaaagatgccgcagagtatgtccgggatggaaacgagctgattgccgccaccatcaccccgcagcacctgatgtttaaccgtaaccacatgctggtgggcggcgttcgcccacatctgtattgtctgccgatcctcaagcgcaacatccaccagcaggcgctacgtgagctggtcgccagcggcttcccgcgcgcgttcctcggcacggattccgccccgcatgcccgtcaccgtaaagaggcgagctgcggctgtgcaggctgttttaacgccccgaccgccctggcaagttacgcaaccgtgtttgaagagatgaatgcgttagaccatttcgaagccttctgctcccttaacggcccgcgtttctacggtctgccggtcaatgacacgttcattgagctggagcgtaaagaaagccaggttgaagcgtcgattgcgctcaccgacgatacgctgatccccttcctggccggtgaaaccgtaaactggacggtaaaacgctaaaaaatcgcgccccctgttgtcaaagcgacaatataactgtataaataaacagtatattacacagggggcatttatgcgtatcgaagtcaccatagccaaatccaccgtcctgcctgctggcgcactcgacgctctggcgggtgaactatcccgacgtattaacagcacttttccagaaaacgatggcgccgtaacggtacgttatgcgacagcaaaccatctttccgtcatcggcggcgcgaaagaagacaaagaacgcatcagcgaaattttgcaggaaacatgggaaagcgccgacgactggttcatcactgattaaaatttgctccctcattgtgtttttttgccgggtcgccccggctttttttcgtttcgtctcctgaaagttcaaaatatttcagcatcttcttagaaaatcgtgaacaagatggcgttttattgttcgaacaatcctaaaaagcataaaaatgtgttgctacccgtttattttttccttctgaacccttattaattgatatactgaaattgctttcagaaaaacatgcattgaacctcaaagtcgttgtcttctaacacgcattaagggggttataatggaaaagaatagtgaagtcatccagacccatccgcttgttggctgggatatcagcaccgtagacagctacgatgcgctgatgctgcgtttgcactaccagaccccaaatcagcaaaaccgtgatgaagcggaagttggacagacgctgtggcttacaacagacgtcgcccgtcagtttatctctattttagaagcaggcatcgcaaaaatagaatctggcgactatcaggaaaatgagtataaacggcattgaccttatgccccttttcactcaacaggcaccctcgcggtgccttatttatttcgttcttgtataagcccacatagttaattactctgctaacaaagcgttagtaaagagaagcctatgaaatacgatttaatcattatcggaagcggctccgtaggatctgccgccggttattatgccacgcaggcgggtctgaaagtgctgatgattgacgcccaccttcccccccactctgaaggaagccatcacggcgatacccgtctaatccgtcacgcttacggtgaaggtgaacgctatgtacctctggtgcttcgggctcagacgctgtgggatgagctggccgcactcaccgaagatcgcatttttgagcgcaccggggtcgttaacctggggccagccagctccacgtttctggcgaccgtcgaggagagcgcgaaagcctaccgcctggacgtcgagcgtctggatgcgaagggcatcatggcgcgctggccggaaatttctgtccctgaaggctacattgggttgtttgaagccaactctggcgtactgcacagcgaaacggccattaagacctggattgatctcgccgccaaagcgggctgcgcgcagttgttcaactgtccggtcacgggcatcacccaccatgcagagggttcaaccgtcaccacctctgaaggtgaatataccgccacgcgcctgctggtcagtgcgggaacgtgggtgacgaaactgctgccgaacctgcccatccagccggtgcgaaaagtcttctcctggttccagtctgacgggcgttacagcagtcagaacaaattcccggcgtttacaggcgagttacccaatggcgaccagttctacggtttcccctcggaaaaagacgcgctcaagattggcaaacataacggcggacaggtaatttcctctgcggaagaacgcaagccttacggtgcttatccgcaggatggttccgaagccttcacgttcctgcgtaatatcctgccgggcgtaggcgggttgctttacggcgcagcgtgcacctacgacaacaccccggatgaagactttatcatcgacaccctgccgggacacgataacaccctgctcgtaaccgggctcagcggtcacgggtttaaatttgcctctgtgttaggtgaaattgccgcccagtttgcgcaggggatcgcgccttcgtttgatctcaagcccttcgcgctctcgcgctttaaccgataatacctctacaggctccgaataaccggggcctgtttagcgagaggggcatgatgcgcagactggtgaattaccttatcaataacatccgcgagcatttcatgctctacattgttctttggtcgctgctggcgatcattgacgttatctatattgtattcttctgaaaattctcgctgacgtttattgacactcctttaaatttatttaacttatattttttaaaaaacgtcacctcaaatttattgaacgaagcgattgaaatacattgnnnnnnnnnnnnnnnnnnnnnnnnnnnnnnnnnnnnnnnnnnnnnnnnnnnnnnnnnnnnnnnnnnnnnnnnnnnnnnnnnnnnnnnnnnnnnnnnnnnnnnnnnnnnnnnnnnnnnnnnnnnnnnnnnnnnnnnnnnnnnnnnnnnnnnnnnnnnnnnnnnnnnnnnnnnnnnnnnnnnnnnnnnnnnnnnnnnnnnnnnnnnnnnnnnnnnnnnnnnnnnnnnnnnnnnnnnnnnnnnnnnnnnnnnnnnnnnnnnnnnnnnnnnnnnnnnnnnnnnnnnnnnnnnnnnnnnnnnnnnnnnnnnnnnnnnnnnnnnnnnnnnnnnnnnnnnnnnnnnnnnnnnnnnnnnnnnnnnnnnnnnnnnnnnnnnnnnnnnnnnnnnnnnnnnnnnnnnnnnnnnnnnnnnnnnnnnnnnnnnnnnnnnnnnnnnnnnnnnnnnnnnnnnnnnnnnnnnnnnnnnnnnnnnnnnnnnnnnnnnnnnnnnnnnnnnnnnnnnnnnnnnnnnnnnnnnnnnnnnnnnnnnnnnnnnnnnnnnnnnnnnnnnnnnnnnnnnnnnnnnnnnnnnnnnnnnnnnnnnnnnnnnnnnnnnnnnnnnnnnnnnnnnnnnnnnnnnnnnnnnnnnnnnnnnnnnnnnnnnnnnnnnnnnnnnnnnnnnnnnnnnnnnnnnnnnnnnnnnnnnnnnnnnnnnnnnnnnnnnnnnnnnnnnnnnnnnnnnnnnnnnnnnnnnnnnnnnnnnnnnnnnnnnnnnnnnnnnnnnnnnnnnnnnnnnnnnnnnnnnnnnnnnnnnnnnnnnnnnnnnnnnnnnnnnnnnnnnnnnnnnnnnnnnnnnnnnnnnnnnnnnnnnnnnnnnnnnnnnnnnnnnnnnnnnnnnnnnnnnnnnnnnnnnnnnnnnnnnnnnnnnnnnnnnnnnnnnnnnnnnnnnnnnnnnnnnnnnnnnnnnnnnnnnnnnnnnnnnnnnnnnnnnnnnnnnnnnnnnnnnntggaaggcgttcagcagaagtcataaaacaggcccggcaggctttcgcgccgccgggcagtgttttactccgggtccggaatacccagtttggtattcagtcggccccgggatttattaaagatcttattcccgttctcgcgtccggcacggcgacgacgttgctcttcttcaggcaagatactctcttcactgcacagctcgctacagcagccattaaacttctcggcacatgcagggcactgaataaacagcagatgacacccgtcgtttttgcagttggtatgcgtatcgcacggtgttccgcactggtggcagtgcgcgatcacgtcctctgaaattcgctcgcccatacgctcgtcaaacacaaagttcttaccgataaaacgcaccggtaaaccctgctcacgggcgcgacgggcatactcaatgatcccaccctcaatgtgccagactttattaaacccgttgtgcttcatccaggcgctggctttttcacagcggatccccccggtgcagtacataacgatctttttgtctttatgctcctgcatcatctcaacggcttttggcagttgctcgcggaaggtgtcggcaggaatttccatcgcattctcgaagtgccccacttcatattcgtagtggttacgcatatcgataaacaccgcatccggatcgtcgagcattgcgttcacttcagcggccttcaggtactcccccacattagcggcattgaagctcggatcgtcaatgccatccgccacaatacgctcgcgcaccttcatgcgcagcacccagaatgatttaccgtcatcatccagcgcaatgttcaggcgtaagccgttaagcgccggatcaaacccgtaaaggaggtcgcggaaggcgctgaccttgctttccggcacgctgatctgcgcgttaatcccctcacgcgccagatagacgcgaccaaacacgttcagggcggtgaaagcctggtaaagcgcatcgcgggtcgcctggggatcatcgatggtgaaatacttatagaaagagatcgttgtgcgcggttcggtttcggccaacatacgcgctttcaacatctcattcgaaacgcggttgtgtaacactggcatggtgtacaagtcctgcaatcgttgagaattaaaatcggtcggcatgatatagcaaacaaagacaatttacatccgcacaatttacgctacatttcagtcaacctgattaatcagacttaacatttgcatattctttcatgtttcgatgacagacattttggctatgccttaaaaaatgagacaatatcctttcaggacgttagaacacaggacagacatgacccagttaccgaaatttactgccgcgcttttgcatccccgctattggttaacatggtcaggcattggcttgttgtggctaattgtacagctgccttatcccgtcattttccgcatgggtaaaggactgggccgcattgctcagcagtttatgaagcgtcgcgccaggatcgcgtatcgtaaccttgagctttgttttcctcagatgagtgaatctgagcgccacgacatggtggttaaaaacttcgaatctgtcggcatggggctgatggagaccggtatggcctggttctggtcggataaacgcatggcgcgctggacggaagtggccgggaccggcatggagccggtgcatactcttcaggccaaccagactggcgtcctgctgattggcgttcatttcctgacgctcgaaattggcgcgcgcatgttcggcatgcaggccccgggtattggcgtttatcgtcctaacgataatccggtgatcgatttgatccagaccaacggacgcatgcgctccaataaaagcatgatcgatcgcaaagacctgaaagggatgatccgcgccctgaaatcaggtgaagtggtctggtatgccccggatcatgactatggcccgcaatccagcgtgtttgtcccgttctttgcggtggaagatgcagcgacgaccaccgggacctggatgctggcgcggatgtccaaagcggctatcgtgccgtttgtgccgcgccgtaaaccagacggttcaggctatcagctcatcatgctggagccggaactcgcgccaccgctgattgatgcagaaaccaccgcccgctggatgaacggcgttgtcgagaaatgcattatgctcgcgccggagcagtacatgtggctgcatcgccgctttaaaacccggcctcagggcgtcccttcccggtattaacctgcgtgcggccttccgggccgcatgttgttttagctttaaaagctccccgtcattgcggcaatcataccccgggcgcataattagcaggcttattacctcactgttcacggtgccctgcacctcattatgcggatagttatgtcccccacagatgctcccataaactggaaacgtaacctgacggttgcgtggctgggttgttttcttactggcgccgcctttagcctggtgatgcccttcctgcccctctacgttgaacagctcggcgtcaccggacatagcgccctgaatatgtggtccggcctggtgttcagcattacgttcctgttctccgccattgcgtcgcctttctggggtgggctggcggatcgcaaaggccgcaaaattatgctgctgcgctccgcgctcggcatggcgatcattatgctgctgatgggggtggcgcagaacgtctggcagttcctgatattacgtgcactcctgggcctgctcgggggatttatccctaacgccaacgccctgatcgccacccaaatcccgcgccagaaaagcggctgggcgttgggcacgctctccactggcggcgtaagcggtgcactgctgggcccactggcgggcgggctgctggccgaccactacggactgcggccggtattcttcattaccgccagcgtgctgttcctctgcttcctggtgacgcttatctgtatccgcgagaatttcacgcccgtggccaaaaaagagatgctgcacgcccgggatgtgctggcctcgctgaaaaacccaaagctgttgctgagcctgtttgtaaccaccatgattatccaggtggccaccggttcaatcgcgcctatactgacgctctacgtacgcgacctggcgggaaacgtcagcaatatcgcctttatcagcggcctaatcgcctctgttcccggcgtggcggcgctactgagcgcgccgaggctcggcaagctgggagaccgtatcggcccggaaaagatccttatctgcgcgctgatcgtctccgtcctgctgctgatccccatggcgttggtgcagtctccgtggcagctcggcgtcctgcgcttcctgctgggggctgcggatggtgcgctactcccggctgtacagacgctgctggtctataactccaccaaccagatagccggtcgtattttcagttataaccagtcgtttcgcgatctgggtaacgtcaccggaccgctggtcggcgcggggatttcggccagcttcggtttcagggcggtctttatcgtgacggcaggcgtcgtgctgttcaacgccgtttattcgtggctcagcttatcccgggcactacgcccggcgcgaataagacaacatcgtgacggctaattttcgcattcatacttgcaaaatcacataatcagctattctttccctgaataccttcacgaaaaacagggagacaccaatgaccatgtacgccacgctggaagaagcaattgatgccgctcgcgaagagttcctcgccgataatcccggcgttgaggaagaagatgctgacgtgcaacaacttaatatccaaaaatacgtcctacaggacggcgatattatgtggcaggccgaattctttgctgatgagggtgaagatggtgaatgtctgccgatactgagtggtgaaggtgcacaggcggtattcgacggcgactacgacgaaattgagttacgtcaggagtggctggaagaaaatacgctgcacgaatgggacgaaggtgagtttcagctcgaaccgccgctggataccgaagagggtcaggccgcagcggacgaatgggacgagcgataagtcactgctactcgtaggggccgtggctggcatcgatgggcagcagtagcgtgtcgaaaatcagcgaaaacggcagatcgagcacggtgagatagcgccatgcggaatcacggacatcccactgtacgccggggtagtactgattcccgtggccctgcccggggatggtgcggctgataatgctgccgcagccgctgagcaggcatgccatcatgattacaatgacgactttcattgttaaacctctaaaaaaataccggcgcttaagccggtattttatttggcgagcaaagaagcgttacttcgccttcagtgccagcggattgagcttcacgtccttgtagtagttcacccacgaagagtatctctccggagcagaccacacgcggtagtgaagccgtgccatcgtcaccggatcgctcaacagcaccagacgacggtcgcggttaagcttttctggcgtctcgttcagcgcctgctcaacgtggcgatcgcgggcgatctccagcacctggctggcgcggtgacgcgccgtcgccatcgcggttgccagcgcgttgaatgacgggttaaacacggcatgcataaagccatcatccagcgtgcgtttgcggttctgctccagataggtatcggtatccaccagcacctgcggcggagaatactcttccgggatcaggaacagcttccagcgtttggtacgcaggcccaccgtggaacggctggagatcaccgacacaaacggcgacaggatcagcgagaagacgattggcgccagccagaacaggaaacgcagatccagccaggccataccaacggcccacaccaggcccagcagcagctgagagccgtggcgcataaaggcttcactccacggcgtagagtcatcatcacgctgcggtgaattccacaccacttcc
